(19) United States
(12) Patent Application Publication
(10) Pub. No.: US 2024/0191214 A1
(43) Pub. Date: Jun. 13, 2024

(54) RECOMBINANT PRENYLTRANSFERASE POLYPEPTIDES ENGINEERED FOR ENHANCED BIOSYNTHESIS OF CANNABINOIDS

(71) Applicants: WILLOW BIOSCIENCES, INC., Calgary (CA); EPIMERON USA, INC., Sunnyvale, CA (US)

(72) Inventors: Trish CHOUDHARY, Belmont, CA (US); Xueyang FENG, Fremont, CA (US); Gisele PASSAIA PRIETSCH, Vancouver (CA)

(21) Appl. No.: 18/424,333

(22) Filed: Jan. 26, 2024

Related U.S. Application Data
(63) Continuation of application No. PCT/US2022/074264, filed on Jul. 28, 2022.
(60) Provisional application No. 63/227,747, filed on Jul. 30, 2021.

(51) Int. Cl. C12N 9/10; C12N 15/52; C12N 15/81; C12P 7/42; C12P 17/06

(52) U.S. Cl. CPC C12N 9/1085; C12N 15/52; C12N 15/81; C12P 7/42; C12P 17/06; C12Y 205/0101

(57) ABSTRACT

The present disclosure relates to recombinant polypeptides that have prenyltransferase activity, nucleic acids encoding these recombinant polypeptides, recombinant host cells that produce these recombinant polypeptides, and compositions comprising the recombinant polypeptides, nucleic acids, and/or recombinant host cells. The present disclosure also relates to uses of these recombinant polypeptides, nucleic acids encoding them, and recombinant host cells comprising them, in methods for the preparation of cannabinoids.

### CROSS REFERENCE TO RELATED APPLICATIONS

[0001] This application is a continuation of International Appl. No. PCT/US2022/074264, filed Jul. 28, 2022, which claims priority of U.S. Provisional Patent Appl. No. 63/227,747, filed Jul. 30, 2021, the entirety of which is hereby incorporated by reference herein.

### FIELD

[0002] The present disclosure relates to recombinant prenyltransferase polypeptides engineered with enhanced activity and the use of recombinant genes encoding these polypeptides in recombinant host cell systems for the production of cannabinoid compounds.

### REFERENCE TO SEQUENCE LISTING

[0003] The official copy of the Sequence Listing is submitted concurrently with the specification via USPTO Patent Center as an WIPO Standard ST.26 formatted XML file with file name “13421-014WO1.xml”, a creation date of Jul. 27, 2022, and a size of 1,010,622 bytes. This Sequence Listing filed via USPTO Patent Center is part of the specification and is incorporated in its entirety by reference herein.

### BACKGROUND

[0004] Cannabinoids are a class of compounds that act on endocannabinoid receptors and include the phytocannabinoids naturally produced by Cannabis sativa. Cannabinoids include the more prevalent and well-known compounds, Δ⁹-tetrahydrocannabinol (THC), cannabidiol (CBD), as well as 80 or more less prevalent cannabinoids, cannabinoid precursors, related metabolites, and synthetically produced derivative compounds. Cannabinoids are increasingly used to treat a range of diseases and conditions such as multiple sclerosis and chronic pain. Current large-scale production of cannabinoids for pharmaceutical or other use is through extraction from plants. These plant-based production processes, however, have several challenges including susceptibility of the plants to inconsistent production caused by variance in biotic and abiotic factors, difficulty reproducing identical cannabinoid accumulation profiles, and difficulty in producing a single cannabinoid compound with purity high enough for pharmaceutical applications. While some cannabinoids can be produced as a single pure product via chemical synthesis, these processes have proven very costly and too costly for large-scale production.

[0005] More economical biosynthetic approaches to cannabinoid production are being developed using microbial hosts. These processes have the potential to be robust, scalable, and capable of producing single cannabinoid compound with higher purity compared to other current processes. Several biosynthetic systems for cannabinoid compound have been reported (see e.g., WO2019071000, WO2018200888, WO2018148849, WO2019014490, US20180073043, US20180334692, and WO2019046941). These biosynthetic systems are capable of producing the cannabinoid, CBGA, to some extent, but are not capable of efficient production of the downstream cannabinoid compounds, CBDA and THCA.

[0006] There exists a need for improved recombinant polypeptides with enhanced prenyltransferase activity, recombinant host cells with genes expressing these polypeptides, and methods for their use in the biosynthetic production of cannabinoid compounds, such as CBGA, CBGVA, CBDA, THCA, and CBCA.

### SUMMARY

[0007] The present disclosure relates generally to recombinant polypeptides engineered with increased prenyltransferase activity relative to the naturally occurring prenyltransferase from Cannabis sativa, and the use of these recombinant polypeptides in recombinant host cell systems and methods for the preparation of cannabinoids. This summary is intended to introduce the subject matter of the present disclosure, but does not cover each and every embodiment, combination, or variation that is contemplated and described within the present disclosure. Further embodiments are contemplated and described by the disclosure of the detailed description, drawings, and claims.

[0008] In at least one embodiment, the present disclosure provides a recombinant polypeptide having prenyltransferase activity, wherein the polypeptide comprises an amino acid sequence of at least 80% identity to SEQ ID NO: 20, and an amino acid residue difference as compared to SEQ ID NO: 20 at one or more positions selected from: W61, F64, I79, F134, W153, F158, S175, S177, T180, N235, E284, and A293; optionally, wherein the amino acid differences are selected from: W61A, W61V, F64G, F64L, F64M, F64T, F64W, I179A, I79C, I79N, I79S, F134G, F134V, W153L, F158A, F158G, F158S, S175A, S175G, S175T, S175V, Y176S, S177A, S177G, S177T, T180I, T180L, T180R, T180V, N235C, N235K, N235V, E284D, E284K, E284R, A293G, A293K, and A293V.

[0009] In at least one embodiment, the polypeptide further comprises an amino acid sequence of at least 80% identity to SEQ ID NO: 20, and an amino acid residue difference as compared to SEQ ID NO: 20 at one or more positions selected from: P5, H7, D10, N11, K34, C41, R46, F49, N50, R52, L54, G58, F65, V68, F75, M80, D87, I91, K93, D95, V99, I105, E106, I113, V115, I121, T123, K125, A129, F138, I140, F144, F161, I165, F173, Y176, S181, V188, R190, F193, S194, F195, I196, I197, M200, G204, M205, S214, E217, D219, T229, F238, S241, V243, L249, S251, S253, W258, S264, M267, F276, C277, L278, F280, Q281, T282, A286, L287, A288, Y290, A291, P294, S295, F299, F301, I302, W303, L304, L305, Y307, A308, E309, Y310, F311, V312, Y313, V314, and F315; optionally, wherein the amino acid differences are selected from: P5G, P5V, H7C, D10L, D10V, D10W, N11D, K34E, C41A, C41G, C41S, R46K, F49L, F49M, F49R, N50D, R52P, L54S, G58S, F65L, V68D, F75W, M80V, D87E, I91V, K93N, D95N, V99A, I105V, E106R, I113N, I113W, V115A, I121T, T123K, K125M, K125V, K125W, A129T, F138I, I140T, F144S, F161V, I165L, I165T, F173I, Y176S, S181R, V188A, V188S, R190A, R190G, R190Q, R190S, F193L, S194A, S194L, S194V, F195V, I196T, I197T, M200R, G204A, G204S, M205G, M205R, S214C, E217G, D219V, T229V, F238L, F238W, S241F, V243A, L249A, L249V, S251A, S251C, S253P, W258R, S264Y, M267T, F276L, C277A, C277M, C277R, L278P, F280G, F280L, F280R, Q281R, T282P, A286G, L287F, A288P, Y290S, A291E, P294E, S295A, F299L, F301S, I302L, W303C, L304R, L305S, Y307H, Y307S, A308E, A308P, A308R, E309V, Y310C, Y310P, Y310S, F311P, F311S, V312G, Y313H, Y313P, V314A, and F315S.

[0010] In at least one embodiment, the polypeptide comprises a combination of amino acid differences as compared to SEQ ID NO: 20 as found in any one of the polypeptides of even-numbered SEQ ID NO: 22-514 and/or as described in Table 3 herein.

[0011] In at least one embodiment, the polypeptide comprises an amino acid sequence of at least 80%, at least 85%, at least 90%, at least 95%, at least 97%, at least 98%, or at least 99% identity to a sequence selected from the group consisting of SEQ ID NO: 22, 24, 26, 28, 30, 32, 34, 36, 38, 40, 42, 44, 46, 48, 50, 52, 54, 56, 58, 60, 62, 64, 66, 68, 70, 72, 74, 76, 78, 80, 82, 84, 86, 88, 90, 92, 94, 96, 98, 100, 102, 104, 106, 108, 110, 112, 114, 116, 118, 120, 122, 124, 126, 128, 130, 132, 134, 136, 138, 140, 142, 144, 146, 148, 150, 152, 154, 156, 158, 160, 162, 164, 166, 168, 170, 172, 174, 176, 178, 180, 182, 184, 186, 188, 190, 192, 194, 196, 198, 200, 202, 204, 206, 208, 210, 212, 214, 216, 218, 220, 222, 224, 226, 228, 230, 232, 234, 236, 238, 240, 242, 244, 246, 248, 250, 252, 254, 256, 258, 260, 262, 264, 266, 268, 270, 272, 274, 276, 278, 280, 282, 284, 286, 288, 290, 292, 294, 296, 298, 300, 302, 304, 306, 308, 310, 312, 314, 316, 318, 320, 322, 324, 326, 328, 330, 332, 334, 336, 338, 340, 342, 344, 346, 348, 350, 352, 354, 356, 358, 360, 362, 364, 366, 368, 370, 372, 374, 376, 378, 380, 382, 384, 386, 388, 390, 392, 394, 396, 398, 400, 402, 404, 406, 408, 410, 412, 414, 416, 418, 420, 422, 424, 426, 428, 430, 432, 434, 436, 438, 440, 442, 444, 446, 448, 450, 452, 454, 456, 458, 460, 462, 464, 466, 468, 470, 472, 474, 476, 478, 480, 482, 484, 486, 488, 490, 492, 494, 496, 498, 500, 502, 504, 506, 508, 510, 512, and 514.

[0012] In at least one embodiment, the prenyltransferase activity of the polypeptide as compared to a polypeptide consisting of SEQ ID NO: 20 is encoded by a polynucleotide sequence having at least 80% identity to SEQ ID NO: 19, and a silent codon difference as compared to SEQ ID NO: 19 at a position encoding an amino acid residue selected from: V33, I37, F73, N74, A78, Q82, K93, P97, V99, S104, L111, L117, G119, F132, V133, I137, G139, F141, R152, Q155, N160, S166, A182, T201, G218, I213, V224, S225, A233, G242, V261, K263, F276, S295, L304, Y306, F311, and V312; optionally, wherein the codon differences are selected from: V33 (GTT>GTC), I37 (ATT>ATC), F73 (TTT>TTC), N74 (AAT>AAC), A78 (GCA>GCG), Q82 (CAA>CAG), K93 (AAG>AAA), P97 (CCA>CCG), V99 (GTT>GTC), S104 (TCA>TCT), L111 (TTA>TTG), L117 (TTG>CTG), G119 (GGT>GGC), F132F (TTC>TTT), V133 (GTT>GTC), G139 (GGT>GGG), R152 (AGA>CGT), Q155 (CAA>CAG), N160 (AAT>AAC), L162 (TTG>CTG), S166 (TCT>TCC), A182 (GCA>GCC), T201 (ACT>ACG), I213 (ATC>ATT), G218 (GGT>GGG), V224 (GTT>GTC), S225 (TCA>TCG), A233 (GCA>GCG), G242 (GGT>GGC), V261 (GTT>GTC), K263 (AAA>AAG), F276 (TTC>TTT), S295 (TCA>TCT), L304 (TTG>CTG), Y306 (TAT>TAC), F311 (TTT>TTC), and V312 (GTT>GTC).

[0013] In at least one embodiment, the polypeptide comprises an N-terminal truncation of from 2 to 12 amino acids as compared to SEQ ID NO: 20; optionally, wherein, the polypeptide comprises an amino acid sequence of at least 80%, at least 85%, at least 90%, at least 95%, at least 97%, at least 98%, or at least 99% identity to a sequence selected from the group consisting of SEQ ID NO: 516, 518, 520, 522, and 524.

[0014] In at least one embodiment, the prenyltransferase activity of the polypeptide as compared to a polypeptide consisting of SEQ ID NO: 20 is increased at least 1.2-fold, at least 1.5-fold, at least 2-fold, at least 5-fold, or more. In at least one embodiment, the prenyltransferase activity of the polypeptide is measured as the rate of conversion of the substrates olivetolic acid (OA) and geranyl pyrophosphate (GPP) to cannabigerolic acid (CBGA).

[0015] In at least one embodiment, the prenyltransferase activity of the polypeptide when expressed in a recombinant host cell comprising a pathway capable of producing olivetolic acid (OA) results in a titer of cannabigerolic acid (CBGA) produced by the cell that is increased relative to a control cell by at least 1.2-fold, at least 1.5-fold, at least 2-fold, at least 5-fold, or more.

[0016] In at least one embodiment, the present disclosure also provides a polynucleotide encoding a recombinant polypeptide having prenyltransferase activity of the present disclosure. In at least one embodiment, the polynucleotide comprises: (a) a sequence of at least 80%, at least 85%, at least 90%, at least 95%, at least 97%, at least 98%, or at least 99% identity to a sequence selected from the group consisting of SEQ ID NO: 21, 23, 25, 27, 29, 31, 33, 35, 37, 39, 41, 43, 45, 47, 49, 51, 53, 55, 57, 59, 61, 63, 65, 67, 69, 71, 73, 75, 77, 79, 81, 83, 85, 87, 89, 91, 93, 95, 97, 99, 101, 103, 105, 107, 109, 111, 113, 115, 117, 119, 121, 123, 125, 127, 129, 131, 133, 135, 137, 139, 141, 143, 145, 147, 149, 151, 153, 155, 157, 159, 161,163, 165, 167, 169, 171, 173, 175, 177, 179, 181, 183, 185, 187, 189, 191, 193, 195, 197, 199, 201, 203, 205, 207, 209, 211, 213, 215, 217, 219, 221, 223, 225, 227, 229, 231, 233, 235, 237, 239, 241, 243, 245, 247, 249, 251, 253, 255, 257, 259, 261, 263, 265, 267, 269, 271, 273, 275, 277, 279, 281, 283, 285, 287, 289, 291, 293, 295, 297, 299, 301, 303, 305, 307, 309, 311, 313, 315, 317, 319, 321, 323, 325, 327, 329, 331, 333, 335, 337, 339, 341, 343, 345, 347, 349, 351, 353, 355, 357, 359, 361, 363, 365, 367, 369, 371, 373, 375, 377, 379, 381, 383, 385, 387, 389, 391, 393, 395, 397, 399, 401, 403, 405, 407, 409, 411, 413, 415, 417, 419, 421, 423, 425, 427, 429, 431, 433, 435, 437, 439, 441, 443, 445, 447, 449, 451, 453, 455, 457, 459, 461, 463, 465, 467, 469, 471, 473, 475, 477, 479, 481, 483, 485, 487, 489, 491, 493, 495, 497, 499, 501, 503, 505, 507, 509, 511, and 513; (b) a codon degenerate sequence of a sequence selected from the group consisting of SEQ ID NO: 21, 23, 25, 27, 29, 31, 33, 35, 37, 39, 41, 43, 45, 47, 49, 51, 53, 55, 57, 59, 61, 63, 65, 67, 69, 71, 73, 75, 77, 79, 81, 83, 85, 87, 89, 91, 93, 95, 97, 99, 101, 103, 105, 107, 109, 111, 113, 115, 117, 119, 121,123, 125, 127, 129, 131,133, 135, 137, 139, 141,143, 145, 147, 149, 151, 153, 155, 157, 159, 161, 163, 165, 167, 169, 171, 173, 175, 177, 179, 181, 183, 185, 187, 189, 191, 193, 195, 197, 199, 201,203, 205, 207, 209, 211,213, 215, 217, 219, 221,223, 225, 227, 229, 231, 233, 235, 237, 239, 241, 243, 245, 247, 249, 251, 253, 255, 257, 259, 261, 263, 265, 267, 269, 271, 273, 275, 277, 279, 281, 283, 285, 287, 289, 291, 293, 295, 297, 299, 301, 303, 305, 307, 309, 311, 313, 315, 317, 319, 321, 323, 325, 327, 329, 331, 333, 335, 337, 339, 341, 343, 345, 347, 349, 351, 353, 355, 357, 359, 361, 363, 365, 367, 369, 371, 373, 375, 377, 379, 381, 383, 385, 387, 389, 391, 393, 395, 397, 399, 401, 403, 405, 407, 409, 411, 413, 415, 417, 419, 421, 423, 425, 427, 429, 431, 433, 435, 437, 439, 441, 443, 445, 447, 449, 451, 453, 455, 457, 459, 461, 463, 465, 467, 469, 471, 473, 475, 477, 479, 481, 483, 485, 487, 489, 491, 493, 495, 497, 499, 501, 503, 505, 507, 509, 511, and 513.

[0017] In at least one embodiment, the present disclosure also provides an expression vector comprising a polynucleotide encoding a recombinant polypeptide having prenyltransferase activity of the present disclosure, optionally wherein, the expression vector comprises a control sequence.

[0018] In at least one embodiment, the present disclosure also provides a recombinant host cell comprising: (a) a polynucleotide encoding a recombinant polypeptide having prenyltransferase activity of the present disclosure, or (b) an expression vector comprising a polynucleotide encoding a recombinant polypeptide having prenyltransferase activity of the present disclosure.

[0019] In at least one embodiment, the present disclosure provides a method for preparing a recombinant polypeptide having prenyltransferase activity of the present disclosure wherein the method comprises culturing a recombinant host cell of the present disclosure and isolating the polypeptide from the cell.

[0020] In at least one embodiment, the present disclosure provides a method for preparing a recombinant polypeptide having prenyltransferase activity comprising:
[0021] (a) transforming a host cell with an expression vector comprising a polynucleotide encoding a recombinant polypeptide having prenyltransferase activity of the present disclosure;
[0022] (b) culturing said transformed host cell under conditions whereby said recombinant polypeptide is produced by said host cell; and
[0023] (c) recovering said recombinant polypeptide from said host cells.

[0024] In at least one embodiment, the present disclosure also provides a recombinant host cell comprising a nucleic acid encoding a recombinant polypeptide having prenyltransferase activity of the present disclosure. In at least one embodiment, the nucleic acid encodes a N-terminal fusion of the Erg20ww polypeptide of SEQ ID NO: 526 and the recombinant polypeptide having prenyltransferase activity of the present disclosure.

[0025] In at least one embodiment of the recombinant host cell, the host cell further comprises a pathway of enzymes capable of producing a cannabinoid precursor; optionally, wherein the cannabinoid precursor is divarinic acid (DA) or olivetolic acid (OA).

[0026] In at least one embodiment of the recombinant host cell, the host cell further comprises a pathway of enzymes capable of converting hexanoic acid (HA) to olivetolic acid (OA); optionally, wherein the pathway comprises enzymes capable of catalyzing reactions (i)-(iii):

[chemical structure]

[0027] In at least one embodiment of the recombinant host cell, the host cell further comprises a pathway of enzymes capable of converting hexanoic acid (HA) to olivetolic acid (OA), wherein the pathway comprises at least the enzymes AAE, OLS, and OAC; optionally, wherein the enzymes AAE, OLS, and OAC, have an amino acid sequence of at least 90% identity to SEQ ID NO: 2 (AAE), SEQ ID NO: 4 (OLS), and SEQ ID NO: 6 (OAC), respectively.

[0028] In at least one embodiment of the recombinant host cell, the host cell further comprises a nucleic acid encoding an enzyme capable of catalyzing the conversion of CBGA to Δ⁹-THCA, CBDA, and/or CBCA; optionally, wherein the host cell further comprises a nucleic acid encoding an enzyme capable of catalyzing a reaction (v), (vi), and/or (vii):

[chemical structure]

[0029] In at least one embodiment of the recombinant host cell, the host cell further comprises a nucleic acid encoding THCA synthase, CBDA synthase, and/or CBCA synthase; optionally, wherein the CBDA synthase has an amino acid sequence of at least 90% identity to SEQ ID NO: 12 or 14; and the THCA synthase having an amino acid sequence of at least 90% identity to SEQ ID NO: 16 or 18.

[0030] In at least one embodiment of the recombinant host cell, the host cell is capable of producing a cannabinoid selected from cannabigerolic acid (CBGA), cannabigerol (CBG), cannabidiolic acid (CBDA), cannabidiol (CBD), Δ⁹-tetrahydrocannabinolic acid (Δ⁹-THCA), Δ⁹-tetrahydrocannabinol (Δ⁹-THC), Δ⁸-tetrahydrocannabinolic acid (Da-THCA), Δ⁸-tetrahydrocannabinol (Da-THC), cannabichromenic acid (CBCA), cannabichromene (CBC), cannabinolic acid (CBNA), cannabinol (CBN), cannabidivarinic acid (CBDVA), cannabidivarin (CBDV), Δ⁹-tetrahydrocannabivarinic acid (Δ⁹-THCVA), Δ⁹-tetrahydrocannabivarin (Δ⁹-THCV), cannabidibutolic acid (CBDBA), cannabidibutol (CBDB), Δ⁹-tetrahydrocannabutolic acid (Δ⁹-THCBA), Δ⁹-tetrahydrocannabutol (Δ⁹-THCB), cannabidiphorolic acid (CBDPA), cannabidiphorol (CBDP), Δ⁹-tetrahydrocannabiphorolic acid (Δ⁹-THCPA), Δ⁹-tetrahydrocannabiphorol (Δ⁹-THCP), cannabichromevarinic acid (CBCVA), cannabichromevarin (CBCV), cannabigerovarinic acid (CBGVA), cannabigerovarin (CBGV), cannabicyclolic acid (CBLA), cannabicyclol (CBL), cannabielsoinic acid (CBEA), cannabielsoin (CBE), cannabicitranic acid (CBTA), cannabicitran (CBT), and any combination thereof.

[0031] In at least one embodiment of the recombinant host cell, the host cell comprises a pathway capable of producing CBGA, and the production of CBGA is increased at least 2-fold, at least 3-fold, at least 4-fold, at least 5-fold, or more, relative to a control recombinant host cell comprising a pathway with the recombinant polypeptide having prenyltransferase activity replaced by a polypeptide of SEQ ID NO: 20.

[0032] In at least one embodiment of the recombinant host cell, the source of the host cell is selected from Saccharomyces cerevisiae, Yarrowia lipolytica, Pichia pastoris, and Escherichia coli. In at least one embodiment, the nucleic acid is integrated in the host cell genome at a locus selected from: NDE1, XII-5, Gal80, ROQ1; optionally, wherein the nucleic acid is integrated in the host cell genome at two loci selected from: XII-5 and NDE1; or ROQ1 and NDE1.

[0033] In at least one embodiment, the present disclosure also provides a method for producing a cannabinoid comprising: (a) culturing in a suitable medium a recombinant host cell of the present disclosure; and (b) recovering the produced cannabinoid. In at least one embodiment, the method further comprises contacting a cell-free extract of the culture with a biocatalytic reagent or chemical reagent.

[0034] In at least one embodiment, the present disclosure also provides a method for preparing a compound of structural formula (I)

[chemical structure]

wherein, R¹ is C1-C7 alkyl; the method comprising contacting under suitable reactions conditions geranyl pyrophosphate (GPP) and a compound of structural formula (II)

[chemical structure]

wherein, R¹ is C1-C7 alkyl, and a recombinant polypeptide having prenyltransferase activity of the present disclosure.

[0035] In at least one embodiment of the method: (a) the compound of structure formula (I) is cannabigerolic acid (CBGA) and the compound of structural formula (II) is olivetolic acid (OA); or (b) the compound of structure formula (I) is cannabigerovarinic acid (CBGVA) and the compound of structural formula (II) is divarinic acid (DA).

### BRIEF DESCRIPTION OF THE DRAWINGS

[0036] A better understanding of the novel features and advantages of the present disclosure will be obtained by reference to the following detailed description that sets forth illustrative embodiments, in which the principles of the disclosure are utilized, and the accompanying drawings (also “Figure” and “FIG.” herein), of which:

[0037] FIG. 1 depicts an exemplary four enzyme pathway capable of converting hexanoic acid (HA) to the cannabinoid precursor, olivetolic acid (OA), and then further converting OA to the cannabinoid, cannabigerolic acid (CBGA). The four enzymes catalyzing the steps in the biosynthetic pathway are AAE, OLS, OAC, and PT.

[0038] FIG. 2 depicts three exemplary two step pathways for converting the cannabinoid, CBGA, to one or more of the cannabinoids, Δ⁹-THCA, CBDA, and/or CBCA, and then, optionally, further converting them to the decarboxylated cannabinoids, Δ⁹-THC, CBD, and/or CBC. The first conversion from CBGA to Δ⁹-THCA, CBDA, and/or CBCA can be catalyzed by a cannabinoid synthase, CBDA synthase (CBDAS), THCA synthase (THCAS) and/or CBCA synthase (CBCAS), respectively. As described elsewhere herein, in some embodiments the single cannabinoid synthase (e.g., CBDAS) is capable of catalyzing not only the conversion of CBGA to its preferred product (e.g., CBDAS preferentially converts CBGA to CBDA), but also converts CBGA to one or both of the other cannabinoid acid products, typically in lesser amounts.

[0039] FIG. 3 depicts an exemplary four enzyme pathway capable of converting butyric acid (BA) to the rare cannabinoid precursor, divarinic acid (DA), and then further converting DA to the rare cannabinoid, cannabigerovarinic acid (CBGVA). The four enzymes catalyzing the steps in the biosynthetic pathway are AAE, OLS, OAC, and PT.

[0040] FIG. 4 depicts three exemplary two step pathways for converting the rare cannabinoid, CBGVA, to one or more of the rare cannabinoids, Δ⁹-THCVA, CBDVA, and/or CBCVA, and then, optionally, further converting them to the decarboxylated cannabinoids, Δ⁹-THCV, CBDV, and/or CBCV. The first conversion from CBGVA to Δ⁹-THCVA, CBDVA, and/or CBCVA can be catalyzed by a single cannabinoid synthase, CBDAs, THCAs and/or CBCAs, respectively. As described elsewhere herein, in some embodiments the single cannabinoid synthase (e.g., CBDAs) is capable of catalyzing not only the conversion of CBGVA to its preferred product (e.g., CBDAs preferentially converts CBGVA to CBDVA), but also converts CBGVA to one or both of the other cannabinoid acid products, typically in lesser amounts.

### DETAILED DESCRIPTION

[0041] For the descriptions herein and the appended claims, the singular forms “a”, and “an” include plural referents unless the context clearly indicates otherwise. Thus, for example, reference to “a protein” includes more than one protein, and reference to “a compound” refers to more than one compound. It is further noted that the claims may be drafted to exclude any optional element. As such, this statement is intended to serve as antecedent basis for use of such exclusive terminology as “solely,” “only” and the like in connection with the recitation of claim elements, or use of a “negative” limitation. The use of “comprise,” “comprises,” “comprising” “include,” “includes,” and “including” are interchangeable and not intended to be limiting. It is to be further understood that where descriptions of various embodiments use the term “comprising,” those skilled in the art would understand that in some specific instances, an embodiment can be alternatively described using language “consisting essentially of” or “consisting of.”

[0042] Where a range of values is provided, unless the context clearly dictates otherwise, it is understood that each intervening integer of the value, and each tenth of each intervening integer of the value, unless the context clearly dictates otherwise, between the upper and lower limit of that range, and any other stated or intervening value in that stated range, is encompassed within the invention. The upper and lower limits of these smaller ranges may independently be included in the smaller ranges, and are also encompassed within the invention, subject to any specifically excluded limit in the stated range. Where the stated range includes one or both of these limits, ranges excluding (i) either or (ii) both of those included limits are also included in the invention. For example, “1 to 50,” includes “2 to 25,” “5 to 20,” “25 to 50,” “1 to 10,” etc.

[0043] Generally, the nomenclature used herein and the techniques and procedures described herein include those that are well understood and commonly employed by those of ordinary skill in the art, such as the common techniques and methodologies described in e.g., Green and Sambrook, Molecular Cloning: A Laboratory Manual (Fourth Edition), Vols. 1-3, Cold Spring Harbor Laboratory, Cold Spring Harbor, N.Y., 2012 (hereinafter “Sambrook”); and Current Protocols in Molecular Biology, F. M. Ausubel et al., eds., originally published in 1987 in book form by Greene Publishing Associates, Inc. and John Wiley & Sons, Inc., and regularly supplemented through 2011, and now available in journal format online as Current Protocols in Molecular Biology, Vols. 00-130, (1987-2020), published by Wiley & Sons, Inc. in the Wiley Online Library (hereinafter “Ausubel”).

[0044] All publications, patents, patent applications, and other documents referenced in this disclosure are hereby incorporated by reference in their entireties for all purposes to the same extent as if each individual publication, patent, patent application or other document were individually indicated to be incorporated by reference herein for all purposes.

[0045] Unless defined otherwise, all technical and scientific terms used herein have the same meaning as commonly understood by one of ordinary skill in the art to which the present invention pertains. It is to be understood that the terminology used herein is for describing particular embodiments only and is not intended to be limiting. For purposes of interpreting this disclosure, the following description of terms will apply and, where appropriate, a term used in the singular form will also include the plural form and vice versa.

### Definitions

[0046] “Cannabinoid” refers to a compound that acts on cannabinoid receptor, and is intended to include the endocannabinoid compounds that are produced naturally in animals, the phytocannabinoid compounds produced naturally in cannabis plants, and the synthetic cannabinoids compounds. Cannabinoids as referenced in the present disclosure include, but are not limited to, the exemplary naturally occurring and synthetic cannabinoid product compounds shown below in Table 1 (below).

TABLE 1
Exemplary cannabinoid product compounds

| | Abbrev. | |
|---|---|---|
| Compound Name | Name | Chemical Structure |
| cannabigerolic acid | CBGA | [chemical structure] |
| cannabigerol | CBG | [chemical structure] |
| Δ⁹-tetrahydrocannabinolic acid | Δ⁹-THCA | [chemical structure] |
| Δ⁹-tetrahydrocannabinol | Δ⁹-THC | [chemical structure] |
| Δ⁸-tetrahydrocannabinolic acid | Δ⁸-THCA | [chemical structure] |
| Δ⁸-tetrahydrocannabinol | Δ⁸-THC | [chemical structure] |
| cannabidiolic acid | CBDA | [chemical structure] |
| cannabidiol | CBD | [chemical structure] |
| cannabichromenic acid | CBCA | [chemical structure] |
| cannabichromene | CBC | [chemical structure] |
| cannabinolic acid | CBNA | [chemical structure] |
| cannabinol | CBN | [chemical structure] |
| cannabidivarinic acid | CBDVA | [chemical structure] |
| cannabidivarin | CBDV | [chemical structure] |
| Δ⁹-tetrahydrocannabivarinic acid | Δ⁹- THCVA | [chemical structure] |
| Δ⁹-tetrahydrocannabivarin | Δ⁹-THCV | [chemical structure] |
| cannabidibutolic acid | CBDBA | [chemical structure] |
| cannabidibutol | CBDB | [chemical structure] |
| Δ⁹-tetrahydrocannabutolic acid | Δ⁹- THCBA | [chemical structure] |
| Δ⁹-tetrahydrocannabutol | Δ⁹-THCB | [chemical structure] |
| cannabigerophorolic acid | CBGPA | [chemical structure] |
| cannabigerophorol | CBGP | [chemical structure] |
| cannabidiphorolic acid | CBDPA | [chemical structure] |
| cannabidiphorol | CBDP | [chemical structure] |
| Δ⁹- tetrahydrocannabidphorolic acid | Δ⁹- THCPA | [chemical structure] |
| Δ⁹-tetrahydrocannabiphorol | Δ⁹-THCP | [chemical structure] |
| cannabichromevarinic acid | CBCVA | [chemical structure] |
| cannabichromevarin | CBCV | [chemical structure] |
| cannabigerovarinic acid | CBGVA | [chemical structure] |
| cannabigerovarin | CBGV | [chemical structure] |
| cannabicyclolic acid | CBLA | [chemical structure] |
| cannabicyclol | CBL | [chemical structure] |
| cannabielsoinic acid | CBEA | [chemical structure] |
| cannabielsoin | CBE | [chemical structure] |
| cannabicitranic acid | CBTA | [chemical structure] |
| cannabicitran | CBT | [chemical structure] |

[0047] “Pathway” refers an ordered sequence of enzymes that act in a linked series to convert an initial substrate molecule into final product molecule. As used herein, “pathway” is intended to encompass naturally-occurring pathways and non-naturally occurring, recombinant pathways. Accordingly, a pathway of the present disclosure can include a series of enzymes that are naturally-occurring and/or non-naturally occurring, and can include a series of enzymes that act in vivo or in vitro.

[0048] “Pathway capable of producing a cannabinoid” refers to a pathway that can convert a cannabinoid precursor molecule, such as hexanoic acid, into a cannabinoid product molecule, such as cannabigerolic acid (CBGA). For example, the four enzymes AAE, OLS, OAC, and PT which convert hexanoic acid to CBGA, form a pathway capable of producing a cannabinoid.

[0049] “Cannabinoid precursor” as used herein refers to a compound capable of being converted into a cannabinoid by a pathway capable producing a cannabinoid. Cannabinoid precursors as referenced in the present disclosure include, but are not limited to, the exemplary naturally occurring and synthetic cannabinoid precursors with varying alkyl carbon chain lengths summarized in Table 2 (below).

TABLE 2
Exemplary cannabinoid precursor compounds

| | Abbrev. | |
|---|---|---|
| Compound Name | Name | Chemical Structure |
| Orcinolic acid (2,4-dihydroxy-6- methylbenzoic acid) | OrcA | [chemical structure] |
| Divarinic acid (2,4-dihydroxy-6- propylbenzoic acid) | DA | [chemical structure] |
| Butolic acid (2-butyl-4,6- dihydroxybenzoic acid) | BA | [chemical structure] |
| Olivetolic acid (2,4-dihydroxy-6- pentylbenzoic acid) | OA | [chemical structure] |
| 2-hexyl-4,6- dihydroxybenzoic acid | DHBA | [chemical structure] |
| Sphaerophorolic acid (2-heptyl-4,6- dihydroxybenzoic acid) | PA | [chemical structure] |

[0050] “Conversion” as used herein refers to the enzymatic conversion of a substrate(s) to a corresponding product(s). “Percent conversion” refers to the percent of the substrate that is converted to the product within a period of time under specified conditions. Thus, the “enzymatic activity” or “activity” of an enzymatic conversion can be expressed as “percent conversion” of the substrate to the product.

[0051] “Substrate” as used herein in the context of an enzyme mediated process refers to the compound or molecule acted on by the enzyme.

[0052] “Product” as used herein in the context of an enzyme mediated process refers to the compound or molecule resulting from the activity of the enzyme.

[0053] “Host cell” as used herein refers to a cell capable of being functionally modified with recombinant nucleic acids and functioning to express recombinant products, including polypeptides and compounds produced by activity of the polypeptides.

[0054] “Nucleic acid,” or “polynucleotide” as used herein interchangeably to refer to two or more nucleosides that are covalently linked together. The nucleic acid may be wholly comprised ribonucleosides (e.g., RNA), wholly comprised of 2′-deoxyribonucleotides (e.g., DNA) or mixtures of ribo- and 2′-deoxyribonucleosides. The nucleoside units of the nucleic acid can be linked together via phosphodiester linkages (e.g., as in naturally occurring nucleic acids), or the nucleic acid can include one or more non-natural linkages (e.g., phosphorothioester linkage). Nucleic acid or polynucleotide is intended to include single-stranded or double-stranded molecules, or molecules having both single-stranded regions and double-stranded regions. Nucleic acid or polynucleotide is intended to include molecules composed of the naturally occurring nucleobases (i.e., adenine, guanine, uracil, thymine, and cytosine), or molecules comprising that include one or more modified and/or synthetic nucleobases, such as, for example, inosine, xanthine, hypoxanthine, etc.

[0055] “Protein,” “polypeptide,” and “peptide” are used herein interchangeably to denote a polymer of at least two amino acids covalently linked by an amide bond, regardless of length or post-translational modification (e.g., glycosylation, phosphorylation, lipidation, myristilation, ubiquitination, etc.). As used herein “protein” or “polypeptide” or “peptide” polymer can include D- and L-amino acids, and mixtures of D- and L-amino acids.

[0056] “Naturally-occurring” or “wild-type” as used herein refers to the form as found in nature. For example, a naturally occurring nucleic acid sequence is the sequence present in an organism that can be isolated from a source in nature and which has not been intentionally modified by human manipulation.

[0057] “Recombinant,” “engineered,” or “non-naturally occurring” when used herein with reference to, e.g., a cell, nucleic acid, or polypeptide, refers to a material, or a material corresponding to the natural or native form of the material, that has been modified in a manner that would not otherwise exist in nature, or is identical thereto but is produced or derived from synthetic materials and/or by manipulation using recombinant techniques. Non-limiting examples include, among others, recombinant cells expressing genes that are not found within the native (non-recombinant) form of the cell or express native genes that are otherwise expressed at a different level.

[0058] “Nucleic acid derived from” as used herein refers to a nucleic acid having a sequence at least substantially identical to a sequence of found in naturally in an organism. For example, cDNA molecules prepared by reverse transcription of mRNA isolated from an organism, or nucleic acid molecules prepared synthetically to have a sequence at least substantially identical to, or which hybridizes to a sequence at least substantially identical to a nucleic sequence found in an organism.

[0059] “Coding sequence” refers to that portion of a nucleic acid (e.g., a gene) that encodes an amino acid sequence of a protein.

[0060] “Heterologous nucleic acid” as used herein refers to any polynucleotide that is introduced into a host cell by laboratory techniques, and includes polynucleotides that are removed from a host cell, subjected to laboratory manipulation, and then reintroduced into a host cell.

[0061] “Codon degenerate” describes a nucleotide sequence that has one or more different codons relative to the reference nucleotide sequence but which encodes a polypeptide that is identical to the polypeptide encoded by a reference nucleotide sequence. The different codons between the nucleotide sequence and the reference nucleotide sequence are called “synonyms” or “synonymous” codons in that they use different triplets of nucleotides to encode the same amino acid in a polypeptide.

[0062] “Codon optimized” refers to changes in the codons of the polynucleotide encoding a protein to those preferentially used in a particular organism such that the encoded protein is efficiently expressed in the organism of interest. Although the genetic code is degenerate in that most amino acids are represented by several different “synonymous” codons, it is well known that codon usage by particular organisms is nonrandom and biased towards particular codon triplets. This codon usage bias may be higher in reference to a given gene, genes of common function or ancestral origin, highly expressed proteins versus low copy number proteins, and the aggregate protein coding regions of an organism's genome. In some embodiments, the polynucleotides encoding the imine reductase enzymes may be codon optimized for optimal production from the host organism selected for expression.

[0063] “Preferred, optimal, high codon usage bias codons” refers to codons that are used at higher frequency in the protein coding regions than other codons that code for the same amino acid. The preferred codons may be determined in relation to codon usage in a single gene, a set of genes of common function or origin, highly expressed genes, the codon frequency in the aggregate protein coding regions of the whole organism, codon frequency in the aggregate protein coding regions of related organisms, or combinations thereof. Codons whose frequency increases with the level of gene expression are typically optimal codons for expression. A variety of methods are known for determining the codon frequency (e.g., codon usage, relative synonymous codon usage) and codon preference in specific organisms, including multivariate analysis, for example, using cluster analysis or correspondence analysis, and the effective number of codons used in a gene (see GCG CodonPreference, Genetics Computer Group Wisconsin Package; CodonW, John Peden, University of Nottingham; McInerney, J. O, 1998, Bioinformatics 14:372-73; Stenico et al., 1994, Nucleic Acids Res. 222437-46; Wright, F., 1990, Gene 87:23-29). Codon usage tables are available for a growing list of organisms (see for example, Wada et al., 1992, Nucleic Acids Res. 20:2111-2118; Nakamura et al., 2000, Nucl. Acids Res. 28:292; Duret, et al., supra; Henaut and Danchin, “Escherichia coli and Salmonella,” 1996, Neidhardt, et al. Eds., ASM Press, Washington D.C., p. 2047-2066. The data source for obtaining codon usage may rely on any available nucleotide sequence capable of coding for a protein. These data sets include nucleic acid sequences actually known to encode expressed proteins (e.g., complete protein coding sequences-CDS), expressed sequence tags (ESTS), or predicted coding regions of genomic sequences (see for example, Mount, D., Bioinformatics: Sequence and Genome Analysis, Chapter 8, Cold Spring Harbor Laboratory Press, Cold Spring Harbor, N.Y., 2001; Uberbacher, E. C., 1996, Methods Enzymol. 266:259-281; Tiwari et al., 1997, Comput. Appl. Biosci. 13:263-270).

[0064] “Control sequence” as used herein refers to all sequences, which are necessary or advantageous for the expression of a polynucleotide and/or polypeptide as used in the present disclosure. Each control sequence may be native or foreign to the nucleic acid sequence encoding a polypeptide. Such control sequences include, but are not limited to, a leader, a promoter, a polyadenylation sequence, a pro-peptide sequence, a signal peptide sequence, and a transcription terminator. At a minimum, control sequences typically include a promoter, and transcriptional and translational stop signals. The control sequences may be provided with linkers for the purpose of introducing specific restriction sites facilitating ligation of the control sequences with the coding region of the nucleic acid sequence encoding a polypeptide.

[0065] “Operably linked” as used herein refers to a configuration in which a control sequence is appropriately placed (e.g., in a functional relationship) at a position relative to a polynucleotide sequence or polypeptide sequence of interest such that the control sequence directs or regulates the expression of the sequence of interest.

[0066] “Promoter sequence” refers to a nucleic acid sequence that is recognized by a host cell for expression of a polynucleotide of interest, such as a coding sequence. The promoter sequence contains transcriptional control sequences, which mediate the expression of a polynucleotide of interest. The promoter may be any nucleic acid sequence which shows transcriptional activity in the host cell of choice including mutant, truncated, and hybrid promoters, and may be obtained from genes encoding extracellular or intracellular polypeptides either homologous or heterologous to the host cell.

[0067] “Percentage of sequence identity,” “percent sequence identity,” “percentage homology,” or “percent homology” are used interchangeably herein to refer to values quantifying comparisons of the sequences of polynucleotides or polypeptides, and are determined by comparing two optimally aligned sequences over a comparison window, wherein the portion of the polynucleotide or polypeptide sequence in the comparison window may comprise additions or deletions (or gaps) as compared to the reference sequence for optimal alignment of the two sequences. The percentage values may be calculated by determining the number of positions at which the identical nucleic acid base or amino acid residue occurs in both sequences to yield the number of matched positions, dividing the number of matched positions by the total number of positions in the window of comparison and multiplying the result by 100 to yield the percentage of sequence identity. Alternatively, the percentage may be calculated by determining the number of positions at which either the identical nucleic acid base or amino acid residue occurs in both sequences or a nucleic acid base or amino acid residue is aligned with a gap to yield the number of matched positions, dividing the number of matched positions by the total number of positions in the window of comparison and multiplying the result by 100 to yield the percentage of sequence identity. Those of skill in the art appreciate that there are many established algorithms available to align two sequences. Optimal alignment of sequences for comparison can be conducted, e.g., by the local homology algorithm of Smith and Waterman, 1981, Adv. Appl. Math. 2:482, by the homology alignment algorithm of Needleman and Wunsch, 1970, J. Mol. Biol. 48:443, by the search for similarity method of Pearson and Lipman, 1988, Proc. Natl. Acad. Sci. USA 85:2444, by computerized implementations of these algorithms (GAP, BESTFIT, FASTA, and TFASTA in the GCG Wisconsin Software Package), or by visual inspection (see generally, Current Protocols in Molecular Biology, F. M. Ausubel et al., eds., Current Protocols, a joint venture between Greene Publishing Associates, Inc. and John Wiley & Sons, Inc., (1995 Supplement) (Ausubel)). Examples of algorithms that are suitable for determining percent sequence identity and sequence similarity are the BLAST and BLAST 2.0 algorithms, which are described in Altschul et al., 1990, J. Mol. Biol. 215: 403-410 and Altschul et al., 1977, Nucleic Acids Res. 3389-3402, respectively. Software for performing BLAST analyses is publicly available through the National Center for Biotechnology Information website. This algorithm involves first identifying high scoring sequence pairs (HSPs) by identifying short words of length W in the query sequence, which either match or satisfy some positive-valued threshold score T when aligned with a word of the same length in a database sequence. T is referred to as, the neighborhood word score threshold (Altschul et al, supra). These initial neighborhood word hits act as seeds for initiating searches to find longer HSPs containing them. The word hits are then extended in both directions along each sequence for as far as the cumulative alignment score can be increased. Cumulative scores are calculated using, for nucleotide sequences, the parameters M (reward score for a pair of matching residues; always >0) and N (penalty score for mismatching residues; always <0). For amino acid sequences, a scoring matrix is used to calculate the cumulative score. Extension of the word hits in each direction are halted when: the cumulative alignment score falls off by the quantity X from its maximum achieved value; the cumulative score goes to zero or below, due to the accumulation of one or more negative-scoring residue alignments; or the end of either sequence is reached. The BLAST algorithm parameters W, T, and X determine the sensitivity and speed of the alignment. The BLASTN program (for nucleotide sequences) uses as defaults a wordlength (W) of 11, an expectation (E) of 10, M=5, N=−4, and a comparison of both strands. For amino acid sequences, the BLASTP program uses as defaults a wordlength (W) of 3, an expectation (E) of 10, and the BLOSUM62 scoring matrix (see Henikoff and Henikoff, 1989, Proc Natl Acad Sci USA 89:10915). Exemplary determination of sequence alignment and % sequence identity can employ the BESTFIT or GAP programs in the GCG Wisconsin Software package (Accelrys, Madison Wis.), using default parameters provided.

[0068] “Reference sequence” refers to a defined sequence used as a basis for a sequence comparison. A reference sequence may be a subset of a larger sequence, for example, a segment of a full-length nucleic acid or polypeptide sequence. A reference sequence typically is at least 20 nucleotide or amino acid residue units in length, but can also be the full length of the nucleic acid or polypeptide. Since two polynucleotides or polypeptides may each (1) comprise a sequence (i.e., a portion of the complete sequence) that is similar between the two sequences, and (2) may further comprise a sequence that is divergent between the two sequences, sequence comparisons between two (or more) polynucleotides or polypeptide are typically performed by comparing sequences of the two polynucleotides or polypeptides over a “comparison window” to identify and compare local regions of sequence similarity. “Comparison window” refers to a conceptual segment of at least about 20 contiguous nucleotide positions or amino acids residues wherein a sequence may be compared to a reference sequence of at least 20 contiguous nucleotides or amino acids and wherein the portion of the sequence in the comparison window may comprise additions or deletions (or gaps) of 20 percent or less as compared to the reference sequence (which does not comprise additions or deletions) for optimal alignment of the two sequences.

[0069] “Substantial identity” or “substantially identical” refers to a polynucleotide or polypeptide sequence that has at least 70% sequence identity, at least 80% sequence identity, at least 85% sequence identity, at least 90% sequence identity, at least 95% sequence identity, or at least 99% sequence identity, as compared to a reference sequence over a comparison window of at least 20 nucleoside or amino acid residue positions, frequently over a window of at least 30-50 positions, wherein the percentage of sequence identity is calculated by comparing the reference sequence to a sequence that includes deletions or additions which total 20 percent or less of the reference sequence over the window of comparison.

[0070] “Corresponding to,” “reference to,” or “relative to” when used in the context of the numbering of a given amino acid or polynucleotide sequence refers to the numbering of the residues of a specified reference sequence when the given amino acid or polynucleotide sequence is compared to the reference sequence. In other words, the residue number or residue position of a given polymer is designated with respect to the reference sequence rather than by the actual numerical position of the residue within the given amino acid or polynucleotide sequence. For example, a given amino acid sequence, such as that of an engineered imine reductase, can be aligned to a reference sequence by introducing gaps to optimize residue matches between the two sequences. In these cases, although the gaps are present, the numbering of the residue in the given amino acid or polynucleotide sequence is made with respect to the reference sequence to which it has been aligned.

[0071] “Isolated” as used herein in reference to a molecule means that the molecule (e.g., cannabinoid, polynucleotide, polypeptide) is substantially separated from other compounds that naturally accompany it, e.g., protein, lipids, and polynucleotides. The term embraces nucleic acids which have been removed or purified from their naturally-occurring environment or expression system (e.g., host cell or in vitro synthesis).

[0072] “Substantially pure” refers to a composition in which a desired molecule is the predominant species present (i.e., on a molar or weight basis it is more abundant than any other individual macromolecular species in the composition), and is generally a substantially purified composition when the object species comprises at least about 50 percent of the macromolecular species present by mole or % weight.

[0073] “Recovered” as used herein in relation to an enzyme, protein, or cannabinoid compound, refers to a more or less pure form of the enzyme, protein, or cannabinoid.

[0074] Recombinant Polypeptides with Enhanced Prenyltransferase Activity

[0075] The present disclosure provides engineered genes that encode recombinant polypeptides having prenyltransferase activity. When integrated into a recombinant host cell (e.g., S. cerevisiae) having a pathway capable of producing a cannabinoid precursor, such as olivetolic acid (OA), the presence of the engineered genes expressing the recombinant polypeptides results in an increased yield of the prenylated product of the cannabinoid precursor. In the case of a recombinant host cell capable of producing the cannabinoid precursor, OA, the prenylated product cannabinoid, CBGA, is produced by the host cell in greater yield relative to a comparable recombinant host cell integrated with the Cannabis sativa CsdPT4 prenyltransferase, which corresponds to the polypeptide of SEQ ID NO: 20. The enzymatic reaction step in the cannabinoid pathway of C. sativa catalyzed by the CsdPT4 polypeptide is the prenylation of the aromatic cannabinoid precursor substrate, OA (compound (2)) with the prenyl group donor substrate, GPP, to form the cannabinoid product CBGA (compound (1)), as shown in Scheme 1.

[chemical structure]

[0076] The recombinant polypeptides with prenyltransferase activity of the present disclosure when incorporated in a recombinant host cell comprising a pathway that produces a cannabinoid precursor, such as OA (compound (2)), are capable, in the presence of GPP, of prenylating that substrate to form a cannabinoid product, such as CBGA (compound (1)). Without intending to be bound by any particular theory or mechanism, the conversion of the cannabinoid precursor substrate, OA (compound (2)), to the CBGA product (compound (1)) as in Scheme 1, when carried out by the recombinant polypeptides with prenyltransferase activity of the present disclosure integrated in a recombinant host cell results in a greater yield of the CBGA, relative to a control recombinant host cell strain integrated with a pathway that instead expresses the CsdPT4 polypeptide of SEQ ID NO: 20. The enhanced yield of the prenylated cannabinoid product is correlated with one or more residue differences in recombinant polypeptides of the present disclosure, as compared to the CsdPT4 amino acid sequence of SEQ ID NO:20, and/or correlated with codon differences in the nucleotide sequences encoding the polypeptides, as compared to the recombinant nucleic acid sequence of SEQ ID NO: 19. Exemplary engineered genes and encoded recombinant polypeptides with prenyltransferase activity that exhibit the unexpected and surprising technical effect of increased cannabinoid product yield when integrated in a recombinant host cell are summarized in Table 3 below.

TABLE 3
Recombinant polypeptides with prenyltransferase activity

| | NT SEQ | AA SEQ |
|---|---|---|
| aa difference and/or nt codon difference relative to CsdPT4 | ID NO: | ID NO: |
| n/a (CsdPT4) | 19 | 20 |
| F134G (TTT > GGG), S175V (TCT > GTG) | 21 | 22 |
| I79C | 23 | 24 |
| E106R (GAA > CGG), A182 (GCA > GCC) | 25 | 26 |
| W61A | 27 | 28 |
| S175V (TCT > GTT) | 29 | 30 |
| G58S, F73 (TTT > TTC) | 31 | 32 |
| W61V | 33 | 34 |
| F64M | 35 | 36 |
| F64L | 37 | 38 |
| F134G (TTT > GGT) | 39 | 40 |
| I79A (ATC > GCT) | 41 | 42 |
| S177A | 43 | 44 |
| F1731 | 45 | 46 |
| W153L (TGG > TTG) | 47 | 48 |
| F64G | 49 | 50 |
| I79S | 51 | 52 |
| G119 (GGG > GGT) | 53 | 54 |
| R152 (AGA > CGT) | 55 | 56 |
| G139 (GGT > GGG), S175V (TCT > GTG) | 57 | 58 |
| M80V | 59 | 60 |
| I79A (ATC > GCG) | 61 | 62 |
| S181R | 63 | 64 |
| S177G (TCA > GGT) | 65 | 66 |
| I113W | 67 | 68 |
| F134G (TTT > GGG) | 69 | 70 |
| E106R (GAA > CGG) | 71 | 72 |
| W153L (TGG > CTG) | 73 | 74 |
| T180R | 75 | 76 |
| S175T | 77 | 78 |
| R46K, F64T | 79 | 80 |
| S177G (TCA > GGG) | 81 | 82 |
| F132 (TTC > TTT) | 83 | 84 |
| I165L | 85 | 86 |
| T180V | 87 | 88 |
| F75W | 89 | 90 |
| S177T | 91 | 92 |
| T180L | 93 | 94 |
| A293G | 95 | 96 |
| N235C | 97 | 98 |
| F161V (TTC > GTT), A293V | 99 | 100 |
| F158G (TTT > GGG) | 101 | 102 |
| S295A | 103 | 104 |
| E284R (GAA > CGG) | 105 | 106 |
| N50D, E284R (GAA > AGG) | 107 | 108 |
| V99A (GTT > GCG) | 109 | 110 |
| E284D | 111 | 112 |
| E284K (GAA > AAA), A291E | 113 | 114 |
| P294E | 115 | 116 |
| E284R (GAA > AGG) | 117 | 118 |
| Q82 (CAA > CAG) | 119 | 120 |
| A293K | 121 | 122 |
| D87E, V99A (GTT > GCG) | 123 | 124 |
| N235V | 125 | 126 |
| P97 (CCA > CCG) | 127 | 128 |
| F161V (TTC > GTT) | 129 | 130 |
| F158G (TTT > GGG) | 131 | 132 |
| E284K (GAA > AAG) | 133 | 134 |
| T229V | 135 | 136 |
| N235K | 137 | 138 |
| P5G, H7C, C41S, F64T, F134G, S175V, S177A, G204S, L249A, | 139 | 140 |
| S295A | | |
| H7C, D10V, C41A, R46K, F64T, I79C, K125W, F134G | 141 | 142 |
| H7C, D10V, I79C, F134G, S175T, S177A, T180R, R190S, G204S | 143 | 144 |
| P5G, H7C, D10V, T180R, G204S, S241F | 145 | 146 |
| D10V, C41S, F64T, I79C, W153L, S175T, T180R, G204S, L249A, | 147 | 148 |
| C277M, F280R, Q281R, A291E, S295A, Y307H, A308E, E309V, | | |
| Y310S | | |
| P5G, H7C, C41A, F64T, I79A, I113N, W153L, S175V, T180R, S194L, | 149 | 150 |
| I197T, G204S | | |
| P5G, H7C, D10V, F64T, W153L, S175V, V188A, R190S | 151 | 152 |
| H7C, R46K, I79C, K125W, F134G, Y176S, S177A, T180R, G204S, | 153 | 154 |
| C277A, L278P, F280G, Q281R, T282P | | |
| H7C, C41S, R46K, I79C, K125W, S175T, S177T, T180R, R190S, | 155 | 156 |
| G204S, S251A, C277M, Q281R, A291E | | |
| P5G, C41A, K125W, W153L, S175T, S177A, T180R | 157 | 158 |
| H7C, S177T, T180R, S194V, G204A, S295A | 159 | 160 |
| P5G, H7C, C41A, F64T, K125W, F134G, S177A, G204S, C277A, | 161 | 162 |
| F280R, F301S | | |
| D10V, C41S, R46K, F134G, W153L, S177T, T180R, V188A, R190S, | 163 | 164 |
| M205G, L249A, C277M, F280R | | |
| P5G, H7C, D10V, F49L, R52P, K125W, W153L, S175V, S177T, | 165 | 166 |
| T180R, S194L, G204S, M205G | | |
| H7C, D10V, C41A, R46K, R52P, S175V, S177A, T180R, V188A, | 167 | 168 |
| G204S, M205G | | |
| P5G, H7C, I79C, F134G, W153L, S175V | 169 | 170 |
| D10V, C41S, R46K, F134G, W153L, S175V, G204S | 171 | 172 |
| H7C, R46K, I79A, S177A, T180R, V188A, G204S | 173 | 174 |
| H7C, D10V, C41A, K125W, W153L, S175T, V188S, R190S, M200R, | 175 | 176 |
| M205G, S214C, D219V, V243A, S251C, S264Y, Q281R, A288P | | |
| H7C, K125W, S175V, S177T, T180R, S194L, G204S, S251A, S295A | 177 | 178 |
| H7C, D10V, C41A, R46K, V68D, I79A, W153L, S175V, S177T, | 179 | 180 |
| T180R, V188A, R190S, G204S, M205G | | |
| P5G, R46K, R52P, F64T, L249A, E284R, A291E, S295A | 181 | 182 |
| P5G, H7C, C41S, R46K, K125W, F134G, I165T, S175T, S177T, | 183 | 184 |
| T180R, G204S, Q281R, S295A | | |
| H7C, D10V, C41A, F64T, W153L, S175V, S177A, T180R, M205G | 185 | 186 |
| P5G, C41S, R52P, I79C | 187 | 188 |
| P5G, H7C, R52P, I79A, F134G, W153L, G204S, M205G, L249A, | 189 | 190 |
| C277A, F280R, Q281R, A291E | | |
| D10V, R46K, W153L, T180R, S194V, L249A, C277M, F280R, Q281R, | 191 | 192 |
| A291E, S295A | | |
| D10V, C41S, K125W, F134G, S175V, S177A, T180R | 193 | 194 |
| P5G, D10V, C41S, K125W, F134G, T180R | 195 | 196 |
| H7C, I79A, K125W, W153L, S175T, T180R, R190S, M205G, L249A, | 197 | 198 |
| S251A, C277A, F280R, A291E | | |
| P5G, H7C, D10V, C41S, R46K, I121T, K125W, F134G, W153L, | 199 | 200 |
| S175V, S177T, T180R, V188A, R190S, M205G | | |
| P5G, C41S, S175V, S177A, T180R, L249A, C277A | 201 | 202 |
| H7C, D10V, F49L, I79C, W153L, S175V, S177T, T180R, V188A, | 203 | 204 |
| S194L | | |
| P5G, H7C, C41S, F49L, R52P, F64T, I79C, K125W, W153L, S175T, | 205 | 206 |
| S177T, T180R, V188A, R190S, G204S, C277M, A291E | | |
| P5G, H7C, D10V, F64T, F134G, W153L, S177T, T180R, L249A, | 207 | 208 |
| C277A, Q281R, A291E, S295A | | |
| H7C, D10V, I79C, S177A, T180R, V188A, R190S, A291E, S295A | 209 | 210 |
| H7C, D10V, C41S, R46K, I79A, K125W, S175V, T180R, R190S | 211 | 212 |
| P5G, H7C, D10V, I79C, K125W, S175V, S177T, R190S, G204S, | 213 | 214 |
| M205G, L249A, S251A, C277M, A291E | | |
| D10V, R46K, K125W, W153L, S175V, S177A, T180R, V188A, | 215 | 216 |
| C277M, S295A | | |
| P5G, H7C, C41S, F64T, K125W, F134G, S175V, S177A, V188A, | 217 | 218 |
| M205G | | |
| P5G, C41A, R46K, F134G, S175T, T180R, V188A, R190S | 219 | 220 |
| H7C, D10V, C41A, R52P, K125W, F134G, S177T, S194V | 221 | 222 |
| P5G, D10V, R52P, I79C, K125W, W153L | 223 | 224 |
| P5G, H7C, D10V, F49L, K125W, F134G, W153L, S194L, G204S, | 225 | 226 |
| Q281R, S295A | | |
| P5G, R52P, F64T, I79C, D95N | 227 | 228 |
| P5G, H7C, I79A, I105V, S177A, T180R, S194V, M205G, Q281R, | 229 | 230 |
| S295A, V314A | | |
| D10V, C41S, R46K, R52P, F64T, F134G, S177A, T180R | 231 | 232 |
| P5G, D10V, R46K, R52P, F64T, I79C, K125W, W153L, T180R | 233 | 234 |
| H7C, C41S, R52P, I79C, K125W, F134G, W153L, S175T, T180I, | 235 | 236 |
| V188A, R190S, L249A, S251A, F280R, Q281R, S295A | | |
| H7C, D10V, K125W, F134G, W153L, S175T, S177T | 237 | 238 |
| P5G, C41S, R46K, K125W, F134G, W153L, S175T, S177A, S194V | 239 | 240 |
| P5G, D10V, I79A, K125W, F134G, S175V, C277M, Q281R, A291E, | 241 | 242 |
| S295A | | |
| P5G, D10V, C41A, R46K, R52P, F134G, W153L, S175T, S177T, | 243 | 244 |
| M205G, L249A, S251A, F280R, Q281R, A291E | | |
| P5G, C41S, I79C, W153L, S175T, M205G, L249A, S251A, C277A, | 245 | 246 |
| F280R, A291E, Y313P | | |
| P5G, H7C, D10V, C41A, R52P, T123K, K125W | 247 | 248 |
| P5G, D10V, C41A, R46K, K125W, F134G, W153L, S175V, S177T, | 249 | 250 |
| T180R, G204S, M205G, S253P, F280R, A291E, S295A, F315S | | |
| H7C, C41A, F49L, I79C, K125W, W153L, S177T | 251 | 252 |
| P5G, H7C, C41A, S177A, T180R, M205G, L249A, S251A, C277A, | 253 | 254 |
| A291E, S295A, F299L | | |
| H7C, D10V, C41S, F64T, S177A, V188A, M205G, L249A, S251A, | 255 | 256 |
| A291E, S295A | | |
| H7C, D10V, R46K, F134V | 257 | 258 |
| P5G, H7C, F49L, F64T, I79C, K125W, W153L, S175T, S194L, | 259 | 260 |
| C277M, F280R, Q281R, A291E, S295A | | |
| P5G, D10V, F64T, F134G, S175T, S177T, T180R, L249A, S251A, | 261 | 262 |
| A291E | | |
| P5G, H7C, D10V, I79A, K125W, W153L, E284K, A291E | 263 | 264 |
| P5G, D10V, F49L, R52P, F134G, S194L, S251A, W258R, Q281R, | 265 | 266 |
| A291E, S295A | | |
| H7C, D10V, C41S, I79C, F134G, V188A, R190S, S214C, A291E, | 267 | 268 |
| S295A, F311S | | |
| C41A, I79A, K125W, F134G, W153L, S175T, S177T, T180R | 269 | 270 |
| P5G, H7C, I79A, S175V, S177T, L249A, S251A, W258R, Q281R | 271 | 272 |
| H7C, D10V, C41A, R46K, F64T, V115A, K125W, T180R, C277A, | 273 | 274 |
| F280R, S295A | | |
| D10V, C41A, R46K, R52P, F64T, K125W, F134G, W153L, S177A, | 275 | 276 |
| T180R, S214C, L249A, E284K, S295A, A308P | | |
| P5G, D10V, C41A, R46K, I79A, F134G, W153L, L249A, Q281R, | 277 | 278 |
| S295A | | |
| P5G, H7C, R46K, K125W, S175V, S177T, T180R, M205G, L249A, | 279 | 280 |
| E284K, S295A | | |
| D10V, C41S, R46K, F65L, K125W, W153L, S177A, T180R, S194L, | 281 | 282 |
| L249A, S251A, C277A | | |
| C41A, R46K, I79C, K93N, K125W | 283 | 284 |
| P5G, H7C, R52P, I79C, K125W, W153L, S177T, T180R, S194L | 285 | 286 |
| C41A, R46K, W153L, S175V, M205G | 287 | 288 |
| H7C, R52P, W153L, S175V, G204S, M205G, C277M, Q281R, S295A | 289 | 290 |
| P5G, R52P, I79A, K125W | 291 | 292 |
| P5G, H7C, D10V, C41S, F49L, R52P, F64T, S175V, S177A, M205G | 293 | 294 |
| P5G, F49L, I79A, S177T | 295 | 296 |
| P5G, D10V, C41S, R46K, I79N, F134G, S175V, S177T, T180R, | 297 | 298 |
| M205G, A291E, S295A | | |
| H7C, D10V, R46K, K125W, F158S, S175V, S177T, T180R, V188A, | 299 | 300 |
| R190S, M205R, L249A, C277R, F280R, Q281R, A291E, Y310S | | |
| P5G, H7C, C41A, R52P, F134G, W153L, S175T, L249A, S251A, | 301 | 302 |
| E284R, S295A, L305S | | |
| H7C, C41S, R46K, K125W, S194L, Q281R, A291E | 303 | 304 |
| H7C, F49L, K125W, F134G, S177T, M205G, E284R, A291E, S295A | 305 | 306 |
| P5G, H7C, D10V, C41A, R46K, F134G, F144S, W153L, G204S, | 307 | 308 |
| L249A, S251A, C277M, F280R, Q281R | | |
| P5G, R46K, L54S, K125W, W153L, S175T, S177T, S214C, F276L, | 309 | 310 |
| F280R, Q281R, A308P, Y310C, Y313H | | |
| P5G, D10V, R46K, I79C | 311 | 312 |
| P5G, D10V, R46K, W153L, S175V, S177T, T180R, S214C, S251A, | 313 | 314 |
| C277M, F280R, Q281R, S295A, F301S, I302L, W303C, L304R, | | |
| Y310S, F311S | | |
| D10V, R46K, F64T, I79A, W153L, S177A, T180R, S194L, S251A, | 315 | 316 |
| S295A | | |
| H7C, D10V, C41A, S175V, F193L | 317 | 318 |
| H7C, C41A, R46K, R52P, K125W, F134G, S177T | 319 | 320 |
| P5G, H7C, D10V, C41A, K125W, S194L, G204S, M205G, F280R, | 321 | 322 |
| A291E, S295A | | |
| P5G, F49L, R52P, K125W, F134G, W153L, S177T, R190S, M205G, | 323 | 324 |
| S214C, F280R, A291E, S295A, V312G, Y313H | | |
| H7C, D10V, K125W, F134G | 325 | 326 |
| D10V, F49L, R52P, F64T, W153L, S175V, S177A, Q281R, S295A, | 327 | 328 |
| F311P | | |
| C41S | 329 | 330 |
| H7C, D10V, C41S, R46K, K125W, W153L, S194A | 331 | 332 |
| R52P, F64T, I79C, F134G, S177A, T180R, L249A, M267T, C277M, | 333 | 334 |
| Q281R, L287F, A288P, Y290S | | |
| D10V, F64T, I79C, K125W, F134G, I140T, S177A, L249A, C277M, | 335 | 336 |
| Q281R, A291E | | |
| D10V, K34E, F49L | 337 | 338 |
| H7C, D10V, C41A, R46K, F64T, K125W, R190S, M205G, C277A, | 339 | 340 |
| S295A, Y307S, A308R, Y310S | | |
| P5G, H7C, D10V, C41G, K125W, F134G, L249V, F280L, A291E | 341 | 342 |
| P5G, F64T, I79C, W153L, I165T, Q281R, A291E, S295A | 343 | 344 |
| H7C, R46K, F64T, I91V, W153L, S175V, S177T, I196T, M205G, | 345 | 346 |
| L249A, C277M, A291E, Y310P | | |
| H7C, C41A, K125W, F134G, W153L, S175T, T180R, R190S, M205G, | 347 | 348 |
| E217G | | |
| P5G, D10W, C41G, F49M, W61A, F64W, I79A, K125M, F158G, | 349 | 350 |
| S175A, S177A, T180L, R190S, S194V, N235K, F238W, C277A, | | |
| E284D, A293V | | |
| P5G, D10V, C41S, F49M, W61A, F64L, I79C, K125V, F158G, S175V, | 351 | 352 |
| S177A, T180V, R190S, S194V, N235C, F238L, C277A, E284K, | | |
| A293K | | |
| P5G, D10V, C41A, F49L, W61A, F64G, I79C, K125V, F158G, S175A, | 353 | 354 |
| S177T, T180V, R190S, S194V, N235K, F238W, C277A, E284D, | | |
| A293G | | |
| C41A, F49L, W61V, F64T, I79A, K125M, F158G, S175A, S177T, | 355 | 356 |
| T180L, R190A, S194V, N235C, F238W, C277A, E284D, A293G | | |
| P5G, D10L, C41A, F49L, W61A, F64T, I79C, K125M, F158G, S175A, | 357 | 358 |
| S177T, T180R, R190S, S194A, N235K, F238W, C277M, E284K, | | |
| A293V | | |
| P5G, D10W, C41S, F49L, W61A, F64T, I79A, K125M, F158G, S175A, | 359 | 360 |
| S177A, T180L, R190Q, S194L, N235C, F238L, C277M, E284K, | | |
| A293V | | |
| P5G, D10L, C41G, F49R, W61A, F64T, I79C, K125W, F158G, S175T, | 361 | 362 |
| S177T, T180R, R190S, S194L, N235K, F238L, C277A, E284D, | | |
| A293G | | |
| P5V, D10L, C41A, F49L, W61A, F64W, I79A, K125V, F158G, S175V, | 363 | 364 |
| S177T, T180R, R190A, S194A, N235C, F238L, C277A, E284R, | | |
| A293G | | |
| P5G, D10V, C41A, F49L, W61A, F64M, I79C, K125V, F158G, S175A, | 365 | 366 |
| S177T, T180L, R190S, S194V, N235C, F238W, C277M, E284R, | | |
| A293G | | |
| P5G, D10W, C41A, F49L, W61A, F64G, I79C, K125W, F158G, | 367 | 368 |
| S175T, S177T, T180R, R190S, S194L, N235C, F238W, C277A, | | |
| E284K, A293G | | |
| P5V, D10L, C41A, F49L, W61V, F64M, I79C, K125V, F158G, S175V, | 369 | 370 |
| S177T, T180R, R190A, S194A, N235C, F238W, C277M, E284K, | | |
| A293V | | |
| P5G, D10L, N11D, C41G, F49L, W61V, F64W, I79C, K125M, F158G, | 371 | 372 |
| S175A, S177T, T180V, R190A, S194A, N235C, F238L, C277M, | | |
| E284K, A293G | | |
| P5G, D10V, C41A, F49R, W61A, F64M, I79C, K125W, F158G, | 373 | 374 |
| S175A, S177A, T180R | | |
| P5V, D10V, C41S, F49M, W61A, F64M, I79A, K125W, F158G, | 375 | 376 |
| S175A, S177G, T180R, R190S, S194V, N235K, F238L, C277M, | | |
| E284R, A293G | | |
| P5V, D10V, C41A, F49R, W61A, F64L, I79A, K125M, F158G, S175T, | 377 | 378 |
| S177G, T180V, R190Q, S194A, N235C, F238L, C277M, E284K, | | |
| A293V | | |
| P5G, D10V, C41A, F49L, W61V, F64G, I79A, K125V, A129T, F158G, | 379 | 380 |
| S175V, S177A, T180R, R190Q, S194L, N235V, F238L, C277M, | | |
| E284D, A293G | | |
| P5G, D10V, C41A, F49L, W61V, F64L, I79A, K125V, F158G, S175A, | 38 | 382 |
| S177T, T180L, R190A, S194A, N11D, N235C, F238L, C277M, | | |
| E284D, A293G | | |
| P5V, D10V, C41A, F49L, W61V, F64T, I79C, K125M, F158G, S175A, | 383 | 384 |
| S177A, T180L, R190Q, S194A, N235V, F238W, C277M, E284K, | | |
| A293G | | |
| P5V, D10W, C41S, F49M, W61A, F64L, I79A, K125W, F158G, | 385 | 386 |
| S175A, S177T, T180V, R190S, S194A, N235K, F238L, C277A, | | |
| E284D, A293K | | |
| P5V, D10L, C41A, F49L, W61A, F64M, I79C, K125M, F158G, S175A, | 387 | 388 |
| S177A, T180L, R190S, S194L, N235C, F238L, C277A, E284R, | | |
| A293G | | |
| P5G, D10V, C41S, F49L, W61V, F64L, I79A, K125W, F158G, S175A, | 389 | 390 |
| S177G, T180R, R190S, S194A, N235C, F238L, C277M, E284R, | | |
| A293G | | |
| P5V, D10V, C41A, F49L, W61V, F64M, I79A, K125W, F158G, S175A, | 391 | 392 |
| S177G, T180V, R190G, S194A, N235C, F238W, C277A, E284R, | | |
| A293V | | |
| P5V, D10V, C41S, F49M, W61V, F64G, I79C, K125W, F158A, S175T, | 393 | 394 |
| S177G, T180V, R190S, S194A, N235K, F238W, C277A, E284D, | | |
| A293G | | |
| P5V, D10W, C41S, F49L, W61A, F64L, I79C, K125M, F138I, F158G, | 395 | 396 |
| S175A, S177A, T180L, R190S, S194V, N235K, F238W, C277M, | | |
| E284R, A293G | | |
| C41S, F49R, W61A, F64L, I79C, K125V, F158A, S175V, S177A, | 397 | 398 |
| T180R, R190S, S194L, N235C, F238W, C277A, E284D, A293G | | |
| P5G, D10V, C41A, F49M, W61A, F64G, I79A, K125W, F158G, | 399 | 400 |
| S175G, S177T, T180R, R190S, S194V, N235K, F238L, C277A, | | |
| E284R, A293G | | |
| P5G, D10V, C41S, F49L, W61A, F64G, I79A, K125W, F158G, S175A, | 401 | 402 |
| S177G, T180L, R190Q, S194V, N235C, F238W, C277M, E284K, | | |
| A293G | | |
| P5G, D10V, C41S, F49M, W61A, F64M, I79A, K125W, F158A, | 403 | 404 |
| S175A, S177T, T180V, R190S, S194L, N235C, F238L, C277M, | | |
| E284D, A293K | | |
| P5G, D10V, C41A, F49M, W61A, F64L, I79C, K125M, A129T, F158G, | 405 | 406 |
| S175G, S177A, T180R, R190A, S194L, N235K, F238L, C277A, | | |
| E284D, A293G | | |
| P5G, D10L, C41S, F49M, W61V, F64W, I79C, K125V, F158A, S175T, | 407 | 408 |
| S177T, T180R, R190S, S194A, N235K, F238L, C277A, E284R, | | |
| A293G | | |
| P5V, D10W, C41G, F49R, W61V, F64T, I79A, K125V, F158G, S175T, | 409 | 410 |
| S177A, T180V, R190S, S194V, N235K, F238L, C277M, E284D, | | |
| A293G | | |
| P5G, D10V, C41A, F49L, W61A, F64M, I79C, K125M, F158G, S175V, | 411 | 412 |
| S177A, T180V, R190Q, S194A, N235V, F238W, C277M, E284D, | | |
| A293G | | |
| P5V, D10W, C41S, F49M, W61A, F64T, I79C, K125M, F158G, | 413 | 414 |
| S175V, S177T, T180V, R190A, S194A, N235K, F238W, C277A, | | |
| E284D, A293K | | |
| C41A, F49L, W61A, F64T, I79A, K125M, F158A, S175V, S177G, | 415 | 416 |
| T180R, R190Q, S194A, N235C, F238W, C277M, E284D, A293G | | |
| P5G, D10L, C41S, F49M, W61V, F64M, I79C, K125W, F158A, | 417 | 418 |
| S175A, S177G, T180R, R190S, S194A, N235K, F238W, C277M, | | |
| E284D, A293G | | |
| P5V, D10W, C41G, F49R, W61A, F64M, I79A, K125V, F158A, S175V, | 419 | 420 |
| S177T, T180R, R190S, S194V, N235C, F238L, C277M, E284R, | | |
| A293K | | |
| P5V, D10V, C41A, F49L, W61V, F64M, I79A, K125W, F158A, S175A, | 421 | 422 |
| S177G, T180R, R190S, S194V, N235C, F238L, C277A, E284D, | | |
| A293G | | |
| P5G, D10W, C41G, F49L, W61V, F64W, I79C, K125W, F158G, | 423 | 424 |
| S175A, S177T, T180V, R190A, S194A, N235V, F238W, C277M, | | |
| E284K, A293K | | |
| P5G, D10V, C41S, F49M, W61V, F64W, I79A, K125W, F158G, | 425 | 426 |
| S175V, S177T, T180R, R190Q, S194A, N235C, F238L, C277A, | | |
| E284D, A293K | | |
| P5G, D10L, C41G, F49L, W61A, F64M, I79A, K125V, F158A, S175A, | 427 | 428 |
| S177G, T180V, R190G, S194L, N235V, F238W, C277M, E284R, | | |
| A286G, A293G | | |
| P5G, D10W, C41A, F49L, W61A, F64M, I79A, K125W, F158G, | 429 | 430 |
| S175G, S177T, T180L, R190Q, S194A, N235K, F238L, C277A, | | |
| E284R, A293G | | |
| P5V, D10L, C41S, F49L, W61A, F64L, I79C, K125M, F158A, S175G, | 431 | 432 |
| S177A, T180R, R190Q, S194V, N235C, F238L, C277M, E284R, | | |
| A293G | | |
| C41S, F49L, W61A, F64M, I79A, K125M, F158A, S175V, S177T, | 433 | 434 |
| T180R, R190G, S194L, N235V, F238L, C277A, E284D, A293G | | |
| P5G, D10V, C41A, F49M, W61A, F64T, I79C, K125V, F158A, S175V, | 435 | 436 |
| S177A, T180L, R190S, S194A, N235V, F238W, C277M, E284R, | | |
| A293G | | |
| P5G, D10V, C41G, F49R, W61A, F64T, I79A, K125W, F158A, S175G, | 437 | 438 |
| S177T, T180L, R190S, S194L, N235C, F238L, C277M, E284D, | | |
| A293G | | |
| P5G, D10W, C41A, F49M, W61V, F64T, I79C, K125M, F158A, | 439 | 440 |
| S175T, S177A, T180L, R190A, S194L, N235C, F238W, C277M, | | |
| E284D, A293G | | |
| P5G, D10L, C41A, F49L, W61A, F64L, I79A, K125W, F158A, S175G, | 441 | 442 |
| S177T, T180V, R190A, S194A, N235C, F238W, C277M, E284R, | | |
| A293G | | |
| P5G, D10L, C41A, F49M, W61A, F64L, I79C, K125V, F158A, S175G, | 443 | 444 |
| S177A, T180V, R190A, F195V, S194L, N235C, F238W, C277A, | | |
| E284D, A293G | | |
| P5V, D10L, C41G, F49M, W61V, F64T, I79C, K125W, F158A, S175T, | 445 | 446 |
| S177A, T180V, R190S, S194V, N235C, F238W, C277A, E284D, | | |
| A293G | | |
| P5G, D10W, C41S, F49L, W61V, F64L, I79A, K125W, F158A, S175A, | 447 | 448 |
| S177G, T180R, R190G, S194L, N235C, F238W, C277A, E284R, | | |
| A293G | | |
| P5G, D10V, C41A, F49M, W61A, F64G, I79A, K125V, F158G, S175A, | 449 | 450 |
| S177A, T180L, R190Q, S194L, N235C, F238W, C277M, E284D, | | |
| A293V | | |
| P5G, D10W, C41G, F49M, W61A, F64W, I79C, K125M, F158G, | 451 | 452 |
| S175A, S177A, T180L, R190A, S194L, N235K, F238W, C277M, | | |
| E284D, A293G | | |
| P5V, D10W, C41G, F49L, W61A, F64W, I79C, K125V, F158G, | 453 | 454 |
| S175G, S177G, T180L, R190S, S194A, N235K, F238L, C277A, | | |
| E284D, A293V | | |
| P5G, D10W, C41A, F49L, W61A, F64G, I79C, K125W, F158A, | 455 | 456 |
| S175A, S177A, T180V, R190S, S194A, N235K, F238W, C277A, | | |
| E284R, A293V | | |
| P5V, D10L, C41S, F49L, W61A, F64M, I79A, K125W, F158A, S175A, | 457 | 458 |
| S177A, T180L, R190S, S194L, N235C, F238L, C277A, E284D, | | |
| A293G | | |
| P5G, D10L, C41A, F49L, W61A, F64M, I79C, K125V, F158A, S175V, | 459 | 460 |
| S177T, T180R, R190A, S194A, N235C, F238W, C277M, E284K, | | |
| A293G | | |
| P5G, D10V, C41S, F49L, W61A, F64T, I79C, K125M, F158A, S175T, | 461 | 462 |
| S177T, T180L, R190Q, S194L, N235C, F238L, C277A, E284D, | | |
| A293G | | |
| K125W, F158A, S175A, S177T, T180L, R190Q, S194A, N235C, | 463 | 464 |
| F238L, C277A, E284D, A293V | | |
| P5G, D10V, C41A, F49L, W61V, F64L, I79A, K125M, F158A, S175G, | 465 | 466 |
| S177G, T180L, R190G, S194V, N235K, F238L, C277A, E284R, | | |
| A293K | | |
| P5V, D10L, C41G, F49L, W61V, F64T, I79C, K125V, F158G, S175G, | 467 | 468 |
| S177T, T180R, R190S, S194L, N235C, F238L, C277M, E284R, | | |
| A293G | | |
| P5V, D10V, C41S, F49M, W61A, F64M, I79A, K125W, F158A, S175A, | 469 | 470 |
| S177G, T180L, R190G, S194A, N235C, F238L, C277A, E284D, | | |
| A293V | | |
| P5G, D10W, C41S, F49M, W61A, F64W, I79C, K125W, F158A, | 471 | 472 |
| S175A, S177A, T180R, R190S, S194A, N235C, F238W, C277M, | | |
| E284D, A293G | | |
| P5V, D10V, C41G, F49L, W61V, F64M, I79C, K125V, F158A, S175G, | 473 | 474 |
| S177T, T180L, R190Q, S194A, N235V, F238L, C277M, E284R, | | |
| A293G | | |
| P5V, D10L, C41S, F49L, W61A, F64T, I79C, K125M, F158G, S175G, | 475 | 476 |
| S177A, T180L, R190A, S194A, N235C, F238L, C277M, E284K, | | |
| A293G | | |
| P5G, D10V, C41A, F49L, W61A, F64G, I79C, K125W, F158A, S175A, | 477 | 478 |
| S177T, T180R, R190S, S194V, N235C, F238W, C277A, E284D, | | |
| A293G | | |
| P5G, D10W, C41G, F49R, W61A, F64L, I79C, K125M, F158A, | 479 | 480 |
| S175A, S177A, T180L, R190A, S194V, N235C, F238W, C277M, | | |
| E284D, A293V | | |
| C41A, F49L, W61V, F64L, I79A, K125V, F158G, S175G, S177G, | 481 | 482 |
| T180L, R190G, S194A, N235V, F238W, C277A, E284D, A293G | | |
| K125W, F158A, S175A, S177G, T180V, R190S, S194L, N235K, | 483 | 484 |
| F238W, C277M, E284R, A293G | | |
| P5V, D10V, C41S, F49M, W61A, F64M, I79C, K125M, F158A, | 485 | 486 |
| S175G, S177T, T180R, R190S, S194A, N235V, F238W, C277A, | | |
| E284R, A293G | | |
| P5G, D10W, C41A, F49L, W61A, F64L, I79C, K125W, F158A, S175A, | 487 | 488 |
| S177G, T180V, R190A, S194A, N235C, F238W, C277A, E284D, | | |
| A293G | | |
| P5G, D10W, C41S, F49L, W61A, F64W, I79A, K125V, F158A, S175T, | 489 | 490 |
| S177G, T180V, R190A, S194L, N235V, F238L, C277M, E284D, | | |
| A293V | | |
| P5V, D10W, C41G, F49L, W61A, F64G, I79A, K125M, F158A, | 491 | 492 |
| S175G, S177A, T180L, R190S, S194V, N235V, F238L, C277A, | | |
| E284D, A293K | | |
| P5G, D10L, C41A, F49L, W61A, F64W, I79C, K125W, F158A, S175V, | 493 | 494 |
| S177A, T180L, R190S, S194L, N235K, F238W, C277M, E284D, | | |
| A293G | | |
| P5V, D10L, C41G, F49R, W61V, F64M, I79A, K125W, F158A, S175T, | 495 | 496 |
| S177A, T180L, R190Q, S194L, N235C, F238W, C277M, E284K, | | |
| A293V | | |
| P5V, D10W, C41G, F49L, W61A, F64G, I79A, K125V, F158A, S175T, | 497 | 498 |
| S177G, T180V, R190Q, S194V, N235V, F238W, C277M, E284K, | | |
| A293G | | |
| P5V, D10W, C41G, F49R, W61A, F64L, I79A, K125M, F158G, | 499 | 500 |
| S175G, S177A, T180L, R190S, S194L, N235C, F238W, C277M, | | |
| E284D, A293G | | |
| P5V, D10W, C41G, F49R, W61A, F64T, I79A, K125V, F158A, S175A, | 501 | 502 |
| S177T, T180R, R190G, S194V, N235K, F238W, C277M, E284D, | | |
| A293G | | |
| P5G, D10W, C41S, F49L, W61A, F64T, I79C, K125V, F158A, S175G, | 503 | 504 |
| S177A, T180L, R190S, S194A, N235V, F238L, C277A, E284D, | | |
| A293G | | |
| P5V, D10W, C41G, F49L, W61A, F64M, I79A, K125V, F158A, S175G, | 505 | 506 |
| S177G, T180L, R190Q, S194L, N235C, F238L, C277A, E284D, | | |
| A293V | | |
| P5G, D10V, C41S, F49M, W61A, F64W, I79C, K125V, F158G, | 507 | 508 |
| S175G, S177T, T180R, R190A, S194L, N235C, F238L, C277M, | | |
| E284R, A293G | | |
| P5G, D10V, C41G, F49R, W61V, F64M, I79A, K125V, F158G, | 509 | 510 |
| S175G, S177G, T180V, R190S, S194V, N235K, F238W, C277A, | | |
| E284K, A293G | | |
| P5G, D10L, C41S, F49L, W61V, F64L, I79A, K125M, F158A, S175G, | 511 | 512 |
| S177G, T180V, R190A, S194A, N235K, F238W, C277M, E284D, | | |
| A293G | | |
| F49R, W61V, F64M, I79A, K125W, F158A, S175G, S177A, T180V, | 513 | 514 |
| R190Q, S194V, N235V, F238W, C277M, E284R, A293G | | |

[0077] In at least one embodiment, the recombinant polypeptides having prenyltransferase activity and increased activity have one or more residue differences as compared to the reference prenyltransferase polypeptide of SEQ ID NO: 20. In some embodiments, the recombinant polypeptides have one or more residue differences at residue positions selected from R46, N50, G58, W61, F64, F75, I79, M80, O87, V99, E106, I113, F134, W153, F158, F161, I165, F173, S175, S177, T180, S181, T229, N235, E284, A291, A293, P294, and S295. In at least one embodiment, the amino acid residue differences are: R46K, N50D, G58S, W61A, W61V, F64G, F64L, F64M, F64T, F75W, I179A, I79C, I79S, M80V, D87E, V99A, E106R, I113W, F134G, W153L, F158G, F161V, I165L, F173I, S175T, S175V, S177A, S177G, S177T, T180L, T180R, T180V, S181R, T229V, N235C, N235K, N235V, E284D, E284K, E284R, A291E, A293G, A293K, A293V, P294E, and S295A.

[0078] In at least one embodiment, the recombinant polypeptides having prenyltransferase activity and increased activity have one or more residue differences as compared to the reference prenyltransferase polypeptide of SEQ ID NO: 20. In some embodiments, the recombinant polypeptides have one or more residue differences at residue positions selected from W61, F64, I79, F134, W153, F158, S175, S177, T180, N235, E284, and A293. In at least one embodiment, the amino acid residue differences are selected from: W61A, W61V, F64G, F64L, F64M, F64T, F64W, I179A, I79C, I79N, I79S, F134G, F134V, W153L, F158A, F158G, F158S, S175A, S175G, S175T, S175V, Y176S, S177A, S177G, S177T, T180I, T180L, T180R, T180V, N235C, N235K, N235V, E284D, E284K, E284R, A293G, A293K, and A293V.

[0079] It is contemplated that the residue differences relative to SEQ ID NO: 20 at residue positions associated with increased prenyltransferase activity can be used in various combinations to form recombinant prenyltransferase polypeptides having desirable functional characteristics when integrated in a recombinant host cell, for example increased yield product of the cannabinoid product compound, CBGA. Some exemplary combinations of amino acid differences include those combinations found in the polypeptides of Table 3 and elsewhere herein. For example, the present disclosure provides a recombinant polypeptide having increased prenyltransferase activity and amino acid residue differences as compared to SEQ ID NO: 20 at various combinations of the following positions: W61, F64, I79, F134, W153, F158, S175, S177, T180, N235, E284, and A293. In at least one embodiment, the recombinant polypeptides can comprise a combination of amino acid differences selected from:

F64T, E284R
F64T, I79C
F64T, S177A
F64T, T180R
F64T, I79C, W153L
F64T, I79C, F134G
F64T, F134G, S177A
F64T, S175V, S177A
F64T, I79C, W153L, T180R
F64T, F134G, S175V, S177A
F64T, F134G, S177A, T180R
F64T, F134G, W153L, S177T, T180R
F64T, I79A, W153L, S175V, T180R
F64T, I79A, W153L, S177A, T180R
F64T, F134G, S175T, S177T, T180R
F64T, I79C, F134G, S177A
F64T, I79C, F134G, S177A, T180R
F64T, F134G, W153L, S177A, T180R, E284K
F64T, I79C, W153L, S175T, S177T, T180R
F64T, I79C, W153L, S175T, T180R
F64T, W153L, S175V, S177A
F64T, W153L, S175V, S177A, T180R
F64T, W153L, S175V, S177T
F64T, W153L, S175V, V188A, R190S
I79A, S177T
I79C, F134G
I79C, W153L
I79A, F134G, S175V
I79A, F134G, W153L
I79A, S175V, S177T
I79A, S177A, T180R
I79A, W153L, E284K
I79C, S175V, S177T
I79C, S177A, T180R
I79C, W153L, S175T
I79C, W153L, S177T
I79A, S175V, T180R
I79A, W153L, S175T, T180R
I79C, F134G, W153L, S175V
I79C, S175T, S177T, T180R
I79C, F134G, S177A, T180R
I79C, W153L, S177T, T180R
I79A, W153L, S175V, S177T, T180R
I79C, F134G, S175T, S177A, T180R
I79C, F134G, W153L, S175T, T180I
I79C, W153L, S175V, S177T, T180R
I79N, F134G, S175V, S177T, T180R
I79A, F134G, W153L, S175T, S177T, T180R
F134G, S177T
F134G, T180R
F134G, W153L
F134G, W153L, S175V
F134G, W153L, S177T
F134G, S177T, E284R
F134G, S175T, T180R
F134G, W153L, S175T, S177A
F134G, W153L, S175T, S177T
F134G, W153L, S175T, T180R
F134G, W153L, S177T, T180R
F134G, S175T, S177T, T180R
F134G, S175V, S177A, T180R
F134G, W153L, S175V, S177T, T180R
W153L, S175T
W153L, T180R
W153L, S175V
W153L, S175T, S177T
W153L, S177A, T180R
S175V, S177T, T180R
W153L, S175T, S177A, T180R
W153L, S175V, S177A, T180R
W153L, S175V, S177T, T180R
S175V, S177T, T180R, E284K
S177A, T180R
S177T, T180R
W61A, F64G, I79A, F158A, S175G, S177A, T180L, N235V, E284D, A293K
W61A, F64G, I79A, F158A, S175T, S177G, T180V, N235V, E284K, A293G
W61A, F64G, I79A, F158G, S175A, S177A, T180L, N235C, E284D, A293V
W61A, F64G, I79A, F158G, S175A, S177G, T180L, N235C, E284K, A293G
W61A, F64G, I79A, F158G, S175G, S177T, T180R, N235K, E284R, A293G
W61A, F64G, I79C, F158A, S175A, S177A, T180V, N235K, E284R, A293V
W61A, F64G, I79C, F158A, S175A, S177T, T180R, N235C, E284D, A293G
W61A, F64G, I79C, F158G, S175A, S177T, T180V, N235K, E284D, A293G
W61A, F64G, I79C, F158G, S175T, S177T, T180R, N235C, E284K, A293G
W61A, F64L, I79A, F158A, S175G, S177T, T180V, N235C, E284R, A293G
W61A, F64L, I79A, F158G, S175A, S177T, T180V, N235K, E284D, A293K
W61A, F64L, I79A, F158G, S175G, S177A, T180L, N235C, E284D, A293G
W61A, F64L, I79A, F158G, S175T, S177G, T180V, N235C, E284K, A293V
W61A, F64L, I79C, F158A, S175A, S177A, T180L, N235C, E284D, A293V
W61A, F64L, I79C, F158A, S175A, S177G, T180V, N235C, E284D, A293G
W61A, F64L, I79C, F158A, S175G, S177A, T180R, N235C, E284R, A293G
W61A, F64L, I79C, F158A, S175G, S177A, T180V, N235C, E284D, A293G
W61A, F64L, I79C, F158A, S175V, S177A, T180R, N235C, E284D, A293G
W61A, F64L, I79C, F158G, S175A, S177A, T180L, N235K, E284R, A293G
W61A, F64L, I79C, F158G, S175G, S177A, T180R, N235K, E284D, A293G
W61A, F64L, I79C, F158G, S175V, S177A, T180V, N235C, E284K, A293K
W61A, F64M, I79A, F158A, S175A, S177A, T180L, N235C, E284D, A293G
W61A, F64M, I79A, F158A, S175A, S177G, T180L, N235C, E284D, A293V
W61A, F64M, I79A, F158A, S175A, S177G, T180V, N235V, E284R, A293G
W61A, F64M, I79A, F158A, S175A, S177T, T180V, N235C, E284D, A293K
W61A, F64M, I79A, F158A, S175G, S177G, T180L, N235C, E284D, A293V
W61A, F64M, I79A, F158A, S175V, S177T, T180R, N235C, E284R, A293K
W61A, F64M, I79A, F158A, S175V, S177T, T180R, N235V, E284D, A293G
W61A, F64M, I79A, F158G, S175A, S177G, T180R, N235K, E284R, A293G
W61A, F64M, I79A, F158G, S175G, S177T, T180L, N235K, E284R, A293G
W61A, F64M, I79C, F158A, S175G, S177T, T180R, N235V, E284R, A293G
W61A, F64M, I79C, F158A, S175V, S177T, T180R, N235C, E284K, A293G
W61A, F64M, I79C, F158G, S175A, S177A, T180L, N235C, E284R, A293G
W61A, F64M, I79C, F158G, S175A, S177A, T180R
W61A, F64M, I79C, F158G, S175A, S177T, T180L, N235C, E284R, A293G
W61A, F64M, I79C, F158G, S175V, S177A, T180V, N235V, E284D, A293G
W61A, F64T, I79A, F158A, S175A, S177T, T180R, N235K, E284D, A293G
W61A, F64T, I79A, F158A, S175G, S177T, T180L, N235C, E284D, A293G
W61A, F64T, I79A, F158A, S175V, S177G, T180R, N235C, E284D, A293G
W61A, F64T, I79A, F158G, S175A, S177A, T180L, N235C, E284K, A293V
W61A, F64T, I79C, F158A, S175G, S177A, T180L, N235V, E284D, A293G
W61A, F64T, I79C, F158A, S175T, S177T, T180L, N235C, E284D, A293G
W61A, F64T, I79C, F158A, S175V, S177A, T180L, N235V, E284R, A293G
W61A, F64T, I79C, F158G, S175A, S177T, T180R, N235K, E284K, A293V
W61A, F64T, I79C, F158G, S175G, S177A, T180L, N235C, E284K, A293G
W61A, F64T, I79C, F158G, S175T, S177T, T180R, N235K, E284D, A293G
W61A, F64T, I79C, F158G, S175V, S177T, T180V, N235K, E284D, A293K
W61A, F64W, I79A, F158A, S175T, S177G, T180V, N235V, E284D, A293V
W61A, F64W, I79A, F158G, S175A, S177A, T180L, N235K, E284D, A293V
W61A, F64W, I79A, F158G, S175V, S177T, T180R, N235C, E284R, A293G
W61A, F64W, I79C, , F158G, S175G, S177G, T180L, N235K, E284D, A293V
W61A, F64W, I79C, F158A, S175A, S177A, T180R, N235C, E284D, A293G
W61A, F64W, I79C, F158A, S175V, S177A, T180L, N235K, E284D, A293G
W61A, F64W, I79C, F158G, S175A, S177A, T180L, N235K, E284D, A293G
W61A, F64W, I79C, F158G, S175G, S177T, T180R, N235C, E284R, A293G
W61V, F64G, I79A, F158G, S175V, S177A, T180R, N235V, E284D, A293G
W61V, F64G, I79C, F158A, S175T, S177G, T180V, N235K, E284D, A293G
W61V, F64L, I79A, F158A, S175A, S177G, T180R, N235C, E284R, A293G
W61V, F64L, I79A, F158A, S175G, S177G, T180L, N235K, E284R, A293K
W61V, F64L, I79A, F158A, S175G, S177G, T180V, N235K, E284D, A293G
W61V, F64L, I79A, F158G, S175A, S177G, T180R, N235C, E284R, A293G
W61V, F64L, I79A, F158G, S175A, S177T, T180L, N235C, E284D, A293G
W61V, F64L, I79A, F158G, S175G, S177G, T180L, N235V, E284D, A293G
W61V, F64M, I79A, F158A, S175A, S177G, T180R, N235C, E284D, A293G
W61V, F64M, I79A, F158A, S175G, S177A, T180V, N235V, E284R, A293G
W61V, F64M, I79A, F158A, S175T, S177A, T180L, N235C, E284K, A293V
W61V, F64M, I79A, F158G, S175A, S177G, T180V, N235C, E284R, A293V
W61V, F64M, I79A, F158G, S175G, S177G, T180V, N235K, E284K, A293G
W61V, F64M, I79C, F158A, S175A, S177G, T180R, N235K, E284D, A293G
W61V, F64M, I79C, F158A, S175G, S177T, T180L, N235V, E284R, A293G
W61V, F64M, I79C, F158G, S175V, S177T, T180R, N235C, E284K, A293V
W61V, F64T, I79A, F158G, S175A, S177T, T180L, N235C, E284D, A293G
W61V, F64T, I79A, F158G, S175T, S177A, T180V, N235K, E284D, A293G
W61V, F64T, I79C, F158A, S175T, S177A, T180L, N235C, E284D, A293G
W61V, F64T, I79C, F158A, S175T, S177A, T180V, N235C, E284D, A293G
W61V, F64T, I79C, F158G, S175A, S177A, T180L, N235V, E284K, A293G
W61V, F64T, I79C, F158G, S175G, S177T, T180R, N235C, E284R, A293G
W61V, F64W, I79A, F158G, S175V, S177T, T180R, N235C, E284D, A293K
W61V, F64W, I79C, F158G, S175A, S177T, T180V, N235C, E284K, A293G
W61V, F64W, I79C, F158G, S175A, S177T, T180V, N235V, E284K, A293K
W61V, F64W, I79C, F158A, S175T, S177T, T180R, N235K, E284R, A293G
F158A, S175A, S177G, T180V, N235K, E284R, A293G
F158A, S175A, S177T, T180L, N235C, E284D, A293V

[0080] In at least one embodiment, the recombinant polypeptides having prenyltransferase activity, increased activity, and one or more residue differences as compared to the reference prenyltransferase polypeptide of SEQ ID NO: 20 at one or more positions selected from W61, F64, I79, F134, W153, F158, S175, S177, T180, N235, E284, and A293 can further comprise an amino acid residue difference as compared to SEQ ID NO: 20 at one or more positions selected from: P5, H7, D10, N11, K34, C41, R46, F49, N50, R52, L54, G58, F65, V68, F75, M80, D87, I91, K93, D95, V99, I105, E106, I113, V115, I121, T123, K125, A129, F138, I140, F144, F161, I165, F173, Y176, S181, V188, R190, F193, S194, F195, I196, I197, M200, G204, M205, S214, E217, D219, T229, F238, S241, V243, L249, S251, S253, W258, S264, M267, F276, C277, L278, F280, Q281, T282, A286, L287, A288, Y290, A291, P294, S295, F299, F301, I302, W303, L304, L305, Y307, A308, E309, Y310, F311, V312, Y313, V314, and F315. In at least one embodiment, the further amino acid differences can be selected from: P5G, P5V, H7C, D10L, D10V, D10W, N11D, K34E, C41A, C41G, C41S, R46K, F49L, F49M, F49R, N50D, R52P, L54S, G58S, F65L, V68D, F75W, M80V, D87E, I91V, K93N, D95N, V99A, I105V, E106R, I113N, I113W, V115A, I121T, T123K, K125M, K125V, K125W, A129T, F138I, I140T, F144S, F161V, I165L, I165T, F173I, Y176S, S181R, V188A, V188S, R190A, R190G, R190Q, R190S, F193L, S194A, S194L, S194V, F195V, I196T, I197T, M200R, G204A, G204S, M205G, M205R, S214C, E217G, D219V, T229V, F238L, F238W, S241F, V243A, L249A, L249V, S251A, S251C, S253P, W258R, S264Y, M267T, F276L, C277A, C277M, C277R, L278P, F280G, F280L, F280R, Q281R, T282P, A286G, L287F, A288P, Y290S, A291E, P294E, S295A, F299L, F301S, I302L, W303C, L304R, L305S, Y307H, Y307S, A308E, A308P, A308R, E309V, Y310C, Y310P, Y310S, F311P, F311S, V312G, Y313H, Y313P, V314A, and F315S.

[0081] Based on the correlation of recombinant polypeptide functional information provided herein with the sequence information provided in Table 3, the accompanying Sequence Listing, and/or the Examples disclosed herein, one of ordinary skill can recognize that the present disclosure provides a range of recombinant polypeptides having prenyltransferase activity, wherein the polypeptide comprises an amino acid sequence comprising one or more of the amino acid differences or sets of amino acid differences (relative to SEQ ID NO: 20) disclosed in any one of SEQ ID NO: 22, 24, 26, 28, 30, 32, 34, 36, 38, 40, 42, 44, 46, 48, 50, 52, 54, 56, 58, 60, 62, 64, 66, 68, 70, 72, 74, 76, 78, 80, 82, 84, 86, 88, 90, 92, 94, 96, 98, 100, 102, 104, 106, 108, 110, 112, 114,116, 118, 120, 122, 124,126, 128, 130, 132, 134,136, 138, 140, 142, 144, 146, 148, 150, 152, 154, 156, 158, 160, 162, 164, 166, 168, 170, 172, 174, 176, 178, 180, 182, 184, 186, 188, 190, 192, 194, 196, 198, 200, 202, 204, 206, 208, 210, 212, 214, 216, 218, 220, 222, 224, 226, 228, 230, 232, 234, 236, 238, 240, 242, 244, 246, 248, 250, 252, 254, 256, 258, 260, 262, 264, 266, 268, 270, 272, 274, 276, 278, 280, 282, 284, 286, 288, 290, 292, 294, 296, 298, 300, 302, 304, 306, 308, 310, 312, 314, 316, 318, 320, 322, 324, 326, 328, 330, 332, 334, 336, 338, 340, 342, 344, 346, 348, 350, 352, 354, 356, 358, 360, 362, 364, 366, 368, 370, 372, 374, 376, 378, 380, 382, 384, 386, 388, 390, 392, 394, 396, 398, 400, 402, 404, 406, 408, 410, 412, 414, 416, 418, 420, 422, 424, 426, 428, 430, 432, 434, 436, 438, 440, 442, 444, 446, 448, 450, 452, 454, 456, 458, 460, 462, 464, 466, 468, 470, 472, 474, 476, 478, 480, 482, 484, 486, 488, 490, 492, 494, 496, 498, 500, 502, 504, 506, 508, 510, 512, and 514, and otherwise have at least 80%, at least 85% at least 90%, at least 95%, at least 97%, at least 98%, or at least 99% identity to a sequence selected from the group consisting of SEQ ID NO: 22, 24, 26, 28, 30, 32, 34, 36, 38, 40, 42, 44, 46, 48, 50, 52, 54, 56, 58, 60, 62, 64, 66, 68, 70, 72, 74, 76, 78, 80, 82, 84, 86, 88, 90, 92, 94, 96, 98, 100, 102, 104, 106, 108, 110, 112, 114, 116, 118, 120, 122, 124, 126, 128, 130, 132, 134, 136, 138, 140, 142, 144, 146, 148, 150, 152, 154, 156, 158, 160, 162, 164, 166, 168, 170, 172, 174, 176, 178, 180, 182, 184, 186, 188, 190, 192, 194, 196, 198, 200, 202, 204, 206, 208, 210, 212, 214, 216, 218, 220, 222, 224, 226, 228, 230, 232, 234, 236, 238, 240, 242, 244, 246, 248, 250, 252, 254, 256, 258, 260, 262, 264, 266, 268, 270, 272, 274, 276, 278, 280, 282, 284, 286, 288, 290, 292, 294, 296, 298, 300, 302, 304, 306, 308, 310, 312, 314, 316, 318, 320, 322, 324, 326, 328, 330, 332, 334, 336, 338, 340, 342, 344, 346, 348, 350, 352, 354, 356, 358, 360, 362, 364, 366, 368, 370, 372, 374, 376, 378, 380, 382, 384, 386, 388, 390, 392, 394, 396, 398, 400, 402, 404, 406, 408, 410, 412, 414, 416, 418, 420, 422, 424, 426, 428, 430, 432, 434, 436, 438, 440, 442, 444, 446, 448, 450, 452, 454, 456, 458, 460, 462, 464, 466, 468, 470, 472, 474, 476, 478, 480, 482, 484, 486, 488, 490, 492, 494, 496, 498, 500, 502, 504, 506, 508, 510, 512, and 514.

[0082] Thus, in at least one embodiment, a recombinant polypeptide of the present disclosure having prenyltransferase activity can have an amino acid sequence comprising one or more of the amino acid differences or sets of amino acid differences (relative to SEQ ID NO: 20) disclosed in any one of SEQ ID NO: 22, 24, 26, 28, 30, 32, 34, 36, 38, 40, 42, 44, 46, 48, 50, 52, 54, 56, 58, 60, 62, 64, 66, 68, 70, 72, 74, 76, 78, 80, 82, 84, 86, 88, 90, 92, 94, 96, 98, 100, 102, 104, 106, 108, 110, 112, 114, 116, 118, 120, 122, 124, 126, 128, 130, 132, 134, 136, 138, 140, 142, 144, 146, 148, 150, 152, 154, 156, 158, 160, 162, 164, 166, 168, 170, 172, 174, 176, 178, 180, 182, 184, 186, 188, 190, 192, 194, 196, 198, 200, 202, 204, 206, 208, 210, 212, 214, 216, 218, 220, 222, 224, 226, 228, 230, 232, 234, 236, 238, 240, 242, 244, 246, 248, 250, 252, 254, 256, 258, 260, 262, 264, 266, 268, 270, 272, 274, 276, 278, 280, 282, 284, 286, 288, 290, 292, 294, 296, 298, 300, 302, 304, 306, 308, 310, 312, 314, 316, 318, 320, 322, 324, 326, 328, 330, 332, 334, 336, 338, 340, 342, 344, 346, 348, 350, 352, 354, 356, 358, 360, 362, 364, 366, 368, 370, 372, 374, 376, 378, 380, 382, 384, 386, 388, 390, 392, 394, 396, 398, 400, 402, 404, 406, 408, 410, 412, 414, 416, 418, 420, 422, 424, 426, 428, 430, 432, 434, 436, 438, 440, 442, 444, 446, 448, 450, 452, 454, 456, 458, 460, 462, 464, 466, 468, 470, 472, 474, 476, 478, 480, 482, 484, 486, 488, 490, 492, 494, 496, 498, 500, 502, 504, 506, 508, 510, 512, and 514, and additionally have 1-2, 1-3, 1-4, 1-5, 1-6, 1-7, 1-8, 1-9, 1-10, 1-11, 1-12, 1-14, 1-15, 1-16, 1-18, 1-20, 1-22, 1-24, 1-26, 1-30, 1-35, 1-40, 1-45, 1-50, 1-55, or 1-60 residue differences at other residue positions. In some embodiments, the number of differences can be 1, 2, 3, 4, 5, 6, 7, 8, 9, 10, 11, 12, 14, 15, 16, 18, 20, 22, 24, 26, 30, 35, 40, 45, 50, 55, or 60 residue differences at the other residue positions.

[0083] In addition to the residue positions specified above, any of the engineered prenyltransferase polypeptides disclosed herein can further comprise other residue differences relative to the reference polypeptide of SEQ ID NO:20 at other residue positions.

[0084] Residue differences at these other residue positions can provide for additional variations in the amino acid sequence without adversely affecting the ability of the recombinant polypeptide to carry out the desired biocatalytic conversion (e.g., conversion of compound (2) to compound (1)). In some embodiments, the recombinant polypeptides can have additionally 1-2, 1-3, 1-4, 1-5, 1-6, 1-7, 1-8, 1-9, 1-10, 1-11, 1-12, 1-14, 1-15, 1-16, 1-18, 1-20, 1-22, 1-24, 1-26, 1-30, 1-35, 1-40 residue differences at other amino acid residue positions as compared to SEQ ID NO: 10. In some embodiments, the number of differences can be 1, 2, 3, 4, 5, 6, 7, 8, 9, 10, 11, 12, 14, 15, 16, 18, 20, 22, 24, 26, 30, 35, and 40 residue differences at other residue positions. The residue difference at these other positions can include conservative changes or non-conservative changes. In some embodiments, the residue differences can comprise conservative substitutions and non-conservative substitutions as compared to the reference polypeptide of SEQ ID NO: 20.

[0085] In some embodiments, the recombinant polypeptides of the disclosure can be in the form of fusion polypeptides in which the engineered polypeptides are fused to other polypeptides, such as, by way of example and not limitation, antibody tags (e.g., myc epitope), purification sequences (e.g., His tags for binding to metals), and cell localization signals (e.g., secretion signals). Thus, the recombinant polypeptides described herein can be used with or without fusions to other polypeptides. It is also contemplated that the recombinant polypeptides described herein are not restricted to the genetically encoded amino acids. In addition to the genetically encoded amino acids, the polypeptides described herein may be comprised, either in whole or in part, of naturally-occurring and/or synthetic non-encoded amino acids.

[0086] In at least one embodiment, it is contemplated that the recombinant polypeptides having prenyltransferase activity of the present disclosure can be expressed as a fusion with a polypeptide having farnesyl pyrophosphate synthetase (FPP synthase) activity, such as the Erg20 polypeptide of Saccharomyces cerevisiae, or a variant thereof, such the well-known variant, Erg20ww of SEQ ID NO: 526. As disclosed elsewhere herein, including the Examples, a nucleic acid encoding an N-terminal fusion of Erg20ww and a recombinant polypeptide having prenyltransferase activity of the present disclosure can be genomically integrated in a yeast strain to provide a pathway for the synthesis of CBGA and other cannabinoids.

[0087] In another aspect, the present disclosure provides polynucleotides encoding the recombinant polypeptides having prenyltransferase activity and increased activity and/or yield as described herein. In at least one embodiment, the polynucleotide encoding a recombinant polypeptide having prenyltransferase activity comprises an amino acid sequence that is at least about 80%, 85%, 90%, 91%, 92%, 93%, 94%, 95%, 96%, 97%, 98%, 99%, or more identical to the polypeptide sequence of SEQ ID NO:20. In some embodiments, the polynucleotide encodes a recombinant polypeptide comprising an amino acid sequence that has the percent identity described above and has one or more amino acid residue differences as compared to SEQ ID NO:20 described elsewhere herein.

[0088] In at least one embodiment, the polynucleotide has a sequence encoding a recombinant polypeptide that does not include an amino acid difference relative to SEQ ID NO: 20, but which polynucleotide sequence has one or more codon differences relative to SEQ ID NO: 19, which codon differences result in increased yield of the prenylated cannabinoid product produced by a recombinant host cell in which the polynucleotide sequence is integrated. In at least one embodiment, the polynucleotide has a sequence of at least 80% identity to SEQ ID NO: 19, and a codon difference as compared to SEQ ID NO: 19 at a position encoding an amino acid residue selected from: V33, I37, F73, N74, A78, Q82, K93, P97, V99, S104, L111, L117, G119, F132, V133, I137, G139, F141, R152, Q155, N160, S166, A182, T201, G218, I213, V224, S225, A233, G242, V261, K263, F276, S295, L304, Y306, F311, and V312. In at least one embodiment, the codon differences at positions V33, I37, F73, N74, A78, Q82, K93, P97, V99, S104, L111, L117, G119, F132, V133, I137, G139, F141, R152, Q155, N160, S166, A182, T201, G218, I213, V224, S225, A233, G242, V261, K263, F276, S295, L304, Y306, F311, and V312 are selected from: V33 (GTT>GTC), I37 (ATT>ATC), F73 (TTT>TTC), N74 (AAT>AAC), A78 (GCA>GCG), Q82 (CAA>CAG), K93 (AAG>AAA), P97 (CCA>CCG), V99 (GTT>GTC), S104 (TCA>TCT), L111 (TTA>TTG), L117 (TTG>CTG), G119 (GGT>GGC), F132F (TTC>TTT), V133 (GTT>GTC), G139 (GGT>GGG), R152 (AGA>CGT), Q155 (CAA>CAG), N160 (AAT>AAC), L162 (TTG>CTG), S166 (TCT>TCC), A182 (GCA>GCC), T201 (ACT>ACG), I213 (ATC>ATT), G218 (GGT>GGG), V224 (GTT>GTC), S225 (TCA>TCG), A233 (GCA>GCG), G242 (GGT>GGC), V261 (GTT>GTC), K263 (AAA>AAG), F276 (TTC>TTT), S295 (TCA>TCT), L304 (TTG>CTG), Y306 (TAT>TAC), F311 (TTT>TTC), and V312 (GTT>GTC).

[0089] It is also contemplated that the polynucleotides encoding the recombinant polypeptides having prenyltransferase activity and increased activity and/or yield as described herein, can include a combination of one or more codon differences relative to SEQ ID NO: 19, wherein at least one the codon differences encodes an amino acid difference as compared to SEQ ID NO: 20 and at least one codon difference does not encode an amino acid difference as compared to SEQ ID NO: 20 Accordingly, in at least one embodiment, the present disclosure provides a polynucleotide sequence encoding a recombinant polypeptide having prenyltransferase activity, wherein the polynucleotide sequence comprises a combination of a codon difference encoding an amino acid difference and a codon difference selected from: G58S and F73 (TTT>TTC); and G139 (GGT>GGG) and S175V.

[0090] In at least one embodiment, the polynucleotide comprises a sequence encoding an exemplary recombinant polypeptide having prenyltransferase activity as disclosed in Table 3 and accompanying Sequence Listing. In at least one embodiment, the polynucleotide comprises a sequence of at least 80%, at least 85%, at least 90%, at least 95%, at least 97%, at least 98%, or at least 99% identity to a sequence selected from the group consisting of SEQ ID NO: 21, 23, 25, 27, 29, 31, 33, 35, 37, 39, 41, 43, 45, 47, 49, 51, 53, 55, 57, 59, 61, 63, 65, 67, 69, 71, 73, 75, 77, 79, 81, 83, 85, 87, 89, 91, 93, 95, 97, 99, 101, 103, 105, 107, 109, 111, 113, 115, 117, 119, 121,123, 125, 127, 129, 131,133, 135, 137, 139, 141,143, 145, 147, 149, 151, 153, 155, 157, 159, 161, 163, 165, 167, 169, 171, 173, 175, 177, 179, 181, 183, 185, 187, 189, 191, 193, 195, 197, 199, 201,203, 205, 207, 209, 211,213, 215, 217, 219, 221,223, 225, 227, 229, 231, 233, 235, 237, 239, 241, 243, 245, 247, 249, 251, 253, 255, 257, 259, 261, 263, 265, 267, 269, 271, 273, 275, 277, 279, 281, 283, 285, 287, 289, 291, 293, 295, 297, 299, 301, 303, 305, 307, 309, 311, 313, 315, 317, 319, 321, 323, 325, 327, 329, 331, 333, 335, 337, 339, 341, 343, 345, 347, 349, 351, 353, 355, 357, 359, 361, 363, 365, 367, 369, 371, 373, 375, 377, 379, 381, 383, 385, 387, 389, 391, 393, 395, 397, 399, 401, 403, 405, 407, 409, 411, 413, 415, 417, 419, 421, 423, 425, 427, 429, 431, 433, 435, 437, 439, 441, 443, 445, 447, 449, 451, 453, 455, 457, 459, 461, 463, 465, 467, 469, 471, 473, 475, 477, 479, 481, 483, 485, 487, 489, 491, 493, 495, 497, 499, 501, 503, 505, 507, 509, 511, and 513. In at least one embodiment, the polynucleotide comprises a codon degenerate sequence of a sequence selected from the group consisting of SEQ ID NO: 21, 23, 25, 27, 29, 31, 33, 35, 37, 39, 41, 43, 45, 47, 49, 51, 53, 55, 57, 59, 61, 63, 65, 67, 69, 71, 73, 75, 77, 79, 81, 83, 85, 87, 89, 91, 93, 95, 97, 99, 101, 103, 105, 107, 109, 111, 113, 115, 117, 119, 121,123, 125, 127, 129, 131,133, 135, 137, 139, 141, 143, 145, 147, 149, 151, 153, 155, 157, 159, 161, 163, 165, 167, 169, 171, 173, 175, 177, 179, 181, 183, 185, 187, 189, 191, 193, 195, 197, 199, 201, 203, 205, 207, 209, 211, 213, 215, 217, 219, 221, 223, 225, 227, 229, 231, 233, 235, 237, 239, 241, 243, 245, 247, 249, 251, 253, 255, 257, 259, 261, 263, 265, 267, 269, 271, 273, 275, 277, 279, 281, 283, 285, 287, 289, 291, 293, 295, 297, 299, 301, 303, 305, 307, 309, 311, 313, 315, 317, 319, 321, 323, 325, 327, 329, 331, 333, 335, 337, 339, 341, 343, 345, 347, 349, 351, 353, 355, 357, 359, 361, 363, 365, 367, 369, 371, 373, 375, 377, 379, 381, 383, 385, 387, 389, 391, 393, 395, 397, 399, 401, 403, 405, 407, 409, 411, 413, 415, 417, 419, 421, 423, 425, 427, 429, 431, 433, 435, 437, 439, 441, 443, 445, 447, 449, 451, 453, 455, 457, 459, 461, 463, 465, 467, 469, 471, 473, 475, 477, 479, 481, 483, 485, 487, 489, 491, 493, 495, 497, 499, 501, 503, 505, 507, 509, 511, and 513.

[0091] The polynucleotide sequences encoding the recombinant polypeptides of the present disclosure may be operatively linked to one or more heterologous regulatory sequences that control gene expression to create a recombinant polynucleotide capable of expressing the polypeptide. Expression constructs containing a heterologous polynucleotide encoding the recombinant polypeptide can be introduced into appropriate host cells to express the corresponding polypeptide. Because of the knowledge of the codons corresponding to the various amino acids, availability of a protein sequence provides a description of all the polynucleotides capable of encoding the subject. The degeneracy of the genetic code, where the same amino acids are encoded by alternative or synonymous codons allows an extremely large number of nucleic acids to be made, all of which encode the improved transaminase enzymes disclosed herein. Thus, having identified a particular amino acid sequence, those skilled in the art could make any number of different nucleic acids by simply modifying the sequence of one or more codons in a way which does not change the amino acid sequence of the protein. In this regard, the present disclosure specifically contemplates each and every possible variation of polynucleotides that could be made by selecting combinations based on the possible codon choices, and all such variations are to be considered specifically disclosed for any polypeptide disclosed herein, including the amino acid sequences presented in Table 3 and the accompanying Sequence Listing.

[0092] The codons can be selected to fit the host cell in which the protein is being produced. For example, preferred codons used in bacteria are used to express the gene in bacteria; preferred codons used in yeast are used for expression in yeast; and preferred codons used in mammals are used for expression in mammalian cells. It is contemplated that all codons need not be replaced to optimize the codon usage of the recombinant polypeptide since the natural sequence will comprise preferred codons and because use of preferred codons may not be required for all amino acid residues. Consequently, codon optimized polynucleotides encoding the recombinant polypeptide may contain preferred codons at about 40%, 50%, 60%, 70%, 80%, or greater than 90% of codon positions of the full length coding region.

[0093] The present disclosure also provides an expression vector comprising a polynucleotide encoding a recombinant polypeptide having prenyltransferase activity and increased thermostability, and one or more expression regulating regions such as a promoter, a terminator, a replication origin, or the like, depending on the type of hosts into which they are to be introduced. The various nucleic acid and control sequences described above may be joined together to produce a recombinant expression vector which may include one or more convenient restriction sites to allow for insertion or substitution of the nucleic acid sequence encoding the recombinant polypeptide at such sites. Alternatively, a polynucleotide sequence of the present disclosure may be expressed by inserting the nucleic acid sequence or a nucleic acid construct comprising the sequence into an appropriate vector for expression. In creating the expression vector, the coding sequence is located in the vector so that the coding sequence is operably linked with the appropriate control sequences for expression. The recombinant expression vector may be any vector (e.g., a plasmid or virus), which can be conveniently subjected to recombinant DNA procedures and can bring about the expression of the polynucleotide sequence. The choice of the vector will typically depend on the compatibility of the vector with the host cell into which the vector is to be introduced. The vectors may be linear or closed circular plasmids.

[0094] The expression vector may be an autonomously replicating vector, i.e., a vector that exists as an extrachromosomal entity, the replication of which is independent of chromosomal replication, e.g., a plasmid, an extrachromosomal element, a mini-chromosome, or an artificial chromosome. The vector may contain any means for assuring self-replication. Alternatively, the vector may be one which, when introduced into the host cell, is integrated into the genome, and replicated together with the chromosome(s) into which it has been integrated. Furthermore, a single vector or plasmid or two or more vectors or plasmids which together contain the total DNA to be introduced into the genome of the host cell, or a transposon may be used. In at least one embodiment, the expression vector further comprises one or more selectable markers, which permit easy selection of transformed cells.

[0095] The present disclosure also provides host cell comprising a polynucleotide or expression vector encoding a recombinant polypeptide of the present disclosure, wherein the polynucleotide is operatively linked to one or more control sequences for expression of the polypeptide having prenyltransferase activity in the host cell. Host cells for use in expressing the polypeptides encoded by the expression vectors of the present invention are well known in the art and include but are not limited to, bacterial cells, such as E. coli, or fungal cells, such as Saccharomyces cerevisiae or Pichia pastoris, insect cells, such as Drosophila S2 and Spodoptera Sf9, animal cells, such as CHO, COS, BHK, 293, and plant cells. Appropriate culture mediums and growth conditions for the above-described host cells are well known in the art. Accordingly, in at least one embodiment, the present disclosure provides a method for producing a cannabinoid comprising: (a) culturing in a suitable medium a recombinant host cell of the present disclosure; and (b) recovering the produced cannabinoid.

[0096] Use in Recombinant Host Cells

[0097] The recombinant polynucleotides of the present disclosure that encode recombinant polypeptides having prenyltransferase activity can be incorporated into recombinant host cells for enhanced in vivo cannabinoid biosynthesis. In the context of recombinant host cells, the recombinant polynucleotides can be incorporated into a pathway capable of producing a cannabinoid precursor, and thereby provide the prenyltransferase activity for biosynthesis of cannabinoids by the cells. As described elsewhere herein, the recombinant polypeptides encoded by the recombinant polynucleotides having prenyltransferase activity of the present disclosure when integrated into recombinant host cells with a pathway that converts hexanoic acid (HA) to the cannabinoid precursor, olivetolic acid (OA) exhibit enhanced yields of prenylated cannabinoid product, CBGA.

[0098] Generally, the cannabinoid pathway of the recombinant host cell is made up of a sequence of linked enzymes that produce a cannabinoid precursor substrate (e.g., OA) and then convert that precursor to a prenylated cannabinoid compound (e.g., CBGA). Accordingly, the pathway comprises at least a prenyltransferase capable of prenylating the aromatic cannabinoid precursor using a prenyl donor substrate, such as GPP. Further enzymatic modification of the initial prenylated cannabinoid compound by cannabinoid synthases (e.g., CBDAS) can also be part of the cannabinoid pathway. As described elsewhere herein, it is contemplated that a wide range of cannabinoid compounds can be produced biosynthetically by a recombinant host cell integrated with such a cannabinoid pathway. Methods and techniques for integrated polynucleotides expressing pathway enzymes into recombinant host cells, such as yeast, are well known in the art and described elsewhere herein including the Examples.

[0099] In at least one embodiment, the pathway integrated in the host cell can comprise a nucleic acid encoding a farnesyl pyrophosphate synthetase (FPP synthase) polypeptide capable of producing the prenyltransferase substrate GPP. One well-known FPP synthase is Erg20 polypeptide from S. cerevisiae, or its well-known variant, Erg20ww (SEQ ID NO: 526). As disclosed elsewhere herein, including the Examples, in at least one embodiment of the recombinant host cells of the present disclosure, a nucleic acid encoding a FPP synthase can be integrated into the host cell as an N-terminal fusion with the recombinant polypeptide having prenyltransferase activity. For example, the present disclosure exemplifies yeast strains integrated with a CBGA producing pathway that includes a nucleic acid encoding an N-terminal fusion of Erg20ww (SEQ ID NO: 526) with the recombinant variant prenyltransferase polypeptides of Table 3 of the present disclosure.

[0100] One exemplary cannabinoid pathway is depicted in FIG. 1. As shown in FIG. 1, this pathway is capable of converting hexanoic acid (HA) to the cannabinoid, cannabigerolic acid (CBGA). The pathway of FIG. 1 includes the sequence of three enzymes: (1) acyl activating enzyme (AAE), a CoA ligase enzyme of class E.C. 6.2.1.1; (2) olivetol synthase (OLS), a CoA synthase enzyme of class E.C. 2.3.1.206; and (3) olivetolic acid cyclase (OAC), a carbon-sulfur lyase enzyme of class E.C. 4.4.1.26. These three enzymes carry out the conversion of the HA starting compound to the cannabinoid precursor compound, OA. When prenyltransferase (PT), a transferase of class E.C. 2.5.1.102, is added to this three enzyme pathway, its activity can catalyze the prenylation of OA with geranyl pyrophosphate (GPP), thereby forming the cannabinoid compound, CBGA. It is contemplated that any of the recombinant polynucleotides of the present disclosure that encode recombinant polypeptides having prenyltransferase activity can be incorporated in such a four enzyme pathway to express the necessary prenyltransferase activity for cannabinoid biosynthesis.

[0101] Accordingly, in at least one embodiment, the present disclosure provides a recombinant host cell comprising recombinant polynucleotides encoding a pathway capable of producing a cannabinoid, wherein the pathway comprises enzymes capable of catalyzing reactions (i)-(iv):

[chemical structure]

[0102] As shown in FIG. 1, exemplary enzymes capable of catalyzing reactions (i)-(iv) are: (i) acyl activating enzyme (AAE); (ii) olivetol synthase (OLS); (iii) olivetolic acid cyclase (OLA); and (iv) prenyltransferase (PT). In at least one embodiment, the prenyltransferase of the pathway of the recombinant host cell is a recombinant polypeptide having prenyltransferase activity of the present disclosure, such as an exemplary recombinant polypeptide as disclosed in Table 3.

[0103] In at least one embodiment, it is contemplated that a recombinant host cell comprising a pathway of only the three enzymes, AAE, OLS, and OAC, could modified by integrating a recombinant polynucleotide of the present disclosure to provide expression of a recombinant polypeptide with the prenyltransferase activity to convert OA to CBGA, thereby providing a four enzyme cannabinoid pathway as depicted in FIG. 1.

[0104] As shown in FIG. 2, the cannabinoid compound, CBGA, that is produced by the pathway of FIG. 1, can be further converted to at least three other different cannabinoid compounds, Δ⁹-tetrahydrocannabinolic acid (THCA), cannabidiolic acid (CBDA), and/or cannabichromenic acid (CBCA). Accordingly, in at least one embodiment, the present disclosure provides a recombinant host cell comprising a pathway capable of converting hexanoic acid to CBGA and further comprising an enzyme capable of catalyzing the conversion of (v) CBGA to Δ⁹-THCA; (vi) CBGA to CBDA; and/or (vii) CBGA to CBCA. Thus, in at least one embodiment, the recombinant host cell comprises pathway capable of converting hexanoic acid to CBGA further comprises further comprises enzymes capable of catalyzing a reaction (v), (vi), and/or (vii):

[chemical structure]

[0105] As shown in FIG. 2, exemplary enzymes capable of catalyzing reaction (v)-(vii) are: (v) THCA synthase (THCAS); (vi) CBDA synthase (CBDAS); and (vii) CBCA synthase (CBCAS). The extension of the four enzyme exemplary pathway of FIG. 1 with polynucleotide sequence capable of expressing such a cannabinoid synthase (e.g., CBDAS, THCAS, and/or CBCAS) allows for the biosynthetic production of one or more of the cannabinoids, Δ⁹-THCA, CBDA, and/or CBCA. These cannabinoids can then be decarboxylated to provide the cannabinoids, Δ⁹-THC, CBD, and/or CBC. Accordingly, it is contemplated, that in some embodiments this further decarboxylation reaction can be carried out under in vitro reaction conditions using the cannabinoid acids separated and/or isolated from the recombinant host cells.

[0106] Exemplary cannabinoid pathway enzymes that can be introduced into a recombinant host cell to provide the pathways illustrated in FIGS. 1 and 2 include, but are not limited to, the enzymes derived from C. sativa, AAE1, OLS, OAC, PT4, CBDAS, and/or THCAS, listed in Table 4 (below), and homologs and variants of these enzymes, as described elsewhere herein.

TABLE 4
Exemplary cannabinoid pathway enzymes

| | | SEQ | SEQ |
|---|---|---|---|
| | | ID | ID |
| Name | Source | NO: | NO: |
| (type) | (accession) | (nt) | (aa) |
| AAE1 | Cannabis sativa | 1 | 2 |
| (acyl activating enzyme) | (AFD33345.1) | | |
| OLS | Cannabis sativa | 3 | 4 |
| (olivetol synthase) | (BAG14339.1) | | |
| OAC | Cannabis sativa | 5 | 6 |
| (olivetolic acid cyclase) | AFN42527.1) | | |
| PT4 | Cannabis sativa | 7 | 8 |
| (aromatic | (DAC76710.1) | | |
| prenyltransferase) | | | |
| d82_PT4 | 82 aa N-term truncation | 9 | 10 |
| (aromatic | of SEQ ID NO: 8 | | |
| prenyltransferase) | | | |
| CBDAS | Cannabis sativa | 11 | 12 |
| (CBDA synthase) | (BAF65033.1) | | |
| d28_CBDAS | 28 aa N-term truncation of | 13 | 14 |
| (CBDA synthase) | SEQ ID NO: 12 | | |
| THCAS | Cannabis sativa | 15 | 16 |
| (THCA synthase) | (BAC41356.1) | | |
| d28_THCAS | 28 aa N-term truncation of | 17 | 18 |
| (THCA synthase) | SEQ ID NO: 16 | | |

[0107] The sequences of the exemplary cannabinoid pathway enzymes AAE1, OLS, OAC, PT4, CBDAS, and THCAS listed in Table 4 are naturally occurring sequences derived from the plant source, Cannabis sativa. In the recombinant host cell embodiments of the present disclosure, it is contemplated that the PT4 enzyme of SEQ ID NO: 10 is replaced in the host cell by a recombinant polynucleotide encoding a recombinant polypeptide having prenyltransferase activity of the present disclosure. It is contemplated that the other heterologous cannabinoid pathway enzymes used in the recombinant host can include enzymes derived from naturally occurring sequence homologs of the AAE1, OLS, OAC, CBDAS, THCAS, CBCAS. For example, based on the sequence, accession, and enzyme classification information provided herein, one of ordinary skill can identify known naturally occurring homologs to AAE1, OLS, OAC, CBDAS, THCAS, CBCAS having activity in the desired biocatalytic reaction. Further, it is contemplated that the pathway enzymes AAE1, OLS, OAC, CBDAS, THCAS, CBCAS, or their homologs, as used in the recombinant host can include enzymes having non-naturally occurring sequences. For example, enzymes with amino acid sequences engineered to function optimally in a particular enzyme pathway, and/or optimally for production of particular cannabinoid, and/or optimally in a particular host. Methods for preparing such non-naturally occurring enzyme sequences are known in the art and include methods for enzyme engineering such as directed evolution (see, e.g., Stemmer, 1994, Proc Natl Acad Sci USA 91:10747-10751; PCT Publ. Nos. WO 95/22625, WO 97/0078, WO 97/35966, WO 98/27230, WO 00/42651, and WO 01/75767; U.S. Pat. Nos. 6,537,746; 6,117,679; 6,376,246; and 6,586,182; and U.S. Pat. Publ. Nos. 20080220990A1 and 20090312196A1; each of which is hereby incorporated by reference herein). Other modifications of cannabinoid pathway enzymes contemplated by the present disclosure include modification of the enzyme's amino acid sequence at either its N- or C-terminus by truncation or fusion. For example, in at least one embodiment of the pathway of producing a cannabinoid, versions of the AAE1, OLS, OAC, and/or CBDAS enzymes that are engineered with amino acid substitutions and/or truncated at the N- or C-terminus can be prepared using methods known in the art, and used in the compositions and methods of the present disclosure. In one embodiment, a CBDAS enzyme of SEQ ID NO: 12 that is truncated at the N-terminus by 28 amino acids to delete the native signal peptide can be used. The amino acid sequence of such a truncated CBDAS is provided herein as the d28_CBDAS enzyme of SEQ ID NO: 14. Accordingly, in at least one embodiment of the recombinant host cell, the pathway capable of producing a cannabinoid comprises at least enzymes having an amino acid sequence at least 90% identity to SEQ ID NO: 2 (AAE1), SEQ ID NO: 4 (OLS), SEQ ID NO: 6 (OAC), and an amino acid sequence of at least 90% identity to recombinant polypeptide of the present disclosure as provided in Table 3 and the accompanying Sequence Listing. Additionally, in at least one embodiment of the recombinant host cell, the pathway capable of producing a cannabinoid can further comprise a cannabinoid synthase of SEQ ID NO: 14 (d28_CBDAS) and/or SEQ ID NO: 18 (d28_THCAS).

[0108] Other cannabinoid pathway enzymes useful in the recombinant host cells and associated methods of the present disclosure are known in the art, and can include naturally occurring enzymes obtained or derived from cannabis plants, or non-naturally occurring enzymes that have been engineered based on the naturally occurring cannabis plant sequences. It is also contemplated that enzymes obtained or derived from other organisms (e.g., microorganisms) having a catalytic activity related to a desired conversion activity useful in a cannabinoid pathway can be engineered for use in a recombinant host cell of the present disclosure.

[0109] Although the cannabinoid pathways of FIGS. 1-2 depict the production of the more common naturally occurring cannabinoids, CBGA, Δ⁹-THCA, CBDA, and CBCA, it is also contemplated that the recombinant polypeptides, cannabinoid pathways, recombinant host cells, and associated methods of the present disclosure can also be used to biosynthesize a range of additional rarely occurring, and/or synthetic cannabinoid compounds. Table 1 depicts the names and structures of a wide range of exemplary rarely occurring, and/or synthetic cannabinoid compounds that are contemplated for production using the recombinant polypeptides, host cells, compositions, and methods of the present disclosure. Similarly, Table 2 depicts additional rarely occurring, and/or synthetic cannabinoid precursor compounds that could be produced by such recombinant host cells in the pathway for production of certain rarely occurring, and/or synthetic cannabinoid compounds of Table 1. Accordingly, in at least one embodiment, a recombinant host cell that includes a pathway to a cannabinoid precursor and that expresses a recombinant polypeptide having prenyltransferase activity of the present disclosure (e.g., as in Table 3) can be used for the biosynthetic production of a rarely occurring, and/or synthetic cannabinoid compound, or a composition comprising such a cannabinoid compound. It is contemplated that the produced rarely occurring, and/or synthetic cannabinoid compound can include, but is not limited to, the cannabinoid compounds of Table 1. Accordingly, in at least embodiment, a recombinant host cell of the present disclosure can be used for production of a cannabinoid compound selected from cannabigerolic acid (CBGA), cannabigerol (CBG), cannabidiolic acid (CBDA), cannabidiol (CBD), Δ⁹-tetrahydrocannabinolic acid (Δ⁹-THCA), Δ⁹-tetrahydrocannabinol (Δ⁹-THC), Δ⁸-tetrahydrocannabinolic acid (Da-THCA), A-tetrahydrocannabinol (Da-THC), cannabichromenic acid (CBCA), cannabichromene (CBC), cannabinolic acid (CBNA), cannabinol (CBN), cannabidivarinic acid (CBDVA), cannabidivarin (CBDV), Δ⁹-tetrahydrocannabivarinic acid (Δ⁹-THCVA), Δ⁹-tetrahydrocannabivarin (Δ⁹-THCV), cannabidibutolic acid (CBDBA), cannabidibutol (CBDB), Δ⁹-tetrahydrocannabutolic acid (Δ⁹-THCBA), Δ⁹-tetrahydrocannabutol (Δ⁹-THCB), cannabidiphorolic acid (CBDPA), cannabidiphorol (CBDP), Δ⁹-tetrahydrocannabiphorolic acid (Δ⁹-THCPA), Δ⁹-tetrahydrocannabiphorol (Δ⁹-THCP), cannabichromevarinic acid (CBCVA), cannabichromevarin (CBCV), cannabigerovarinic acid (CBGVA), cannabigerovarin (CBGV), cannabicyclolic acid (CBLA), cannabicyclol (CBL), cannabielsoinic acid (CBEA), cannabielsoin (CBE), cannabicitranic acid (CBTA), cannabicitran (CBT), and any combination thereof.

[0110] In at least one embodiment, the compositions and methods of the present disclosure can be used for the production of the rare varin series of cannabinoids, CBGVA, Δ⁹-THCVA, CBDVA, and CBCVA. As shown in Table 1, the varin cannabinoids feature a 3 carbon propyl side-chain rather than the 5 carbon pentyl side chain found in the common cannabinoids, CBGA, Δ⁹-THCA, CBDA, and CBCA. An exemplary cannabinoid pathway capable of producing the rare naturally occurring cannabinoid, cannabigerovarinic acid (CBGVA), is depicted in FIG. 3. Instead of starting with hexanoic acid, the pathway of FIG. 3 is fed butyric acid (BA) which is converted to divarinic acid (DA) via the same three enzyme pathway of AAE, OLS, and OAC. The cannabinoid precursor DA is then converted by an prenyltransferase to the rare cannabinoid, CBGVA. In at least one embodiment of the present disclosure, the prenyltransferase of the pathway of the recombinant host cell is a recombinant polypeptide having prenyltransferase activity of the present disclosure, such as an exemplary recombinant polypeptide as disclosed in Table 3. Accordingly, in at least one embodiment of the recombinant host cell, the pathway capable of producing a cannabinoid comprises enzymes capable of catalyzing reactions (i)-(iv):

[chemical structure]

[0111] Exemplary enzymes capable of catalyzing reactions (i)-(iv) are: (i) acyl activating enzyme (AAE); (ii) olivetol synthase (OLS); (iii) olivetolic acid cyclase (OLA); and (iv) a recombinant polypeptide having prenyltransferase activity as disclosed herein (e.g., a polypeptide of Table 3). Exemplary enzymes, AAE, OLS, and OLA, derived from C. sativa are known in the art and also provided in Table 1 and the accompanying Sequence Listing.

[0112] As further illustrated in FIG. 4, the heterologous pathway depicted in FIG. 3 which is capable of producing a rare cannabinoid, such as CBGVA, can be further modified to include one or more cannabinoid synthase enzymes (e.g., CBDAS, THCAS, CBCAS). As shown by the exemplary pathway of FIG. 4, with the incorporation of one or more synthase enzymes, the rare varin cannabinoid, CBGVA, can be converted to the rare varin cannabinoids, cannabidivarinic acid (CBDVA), Δ⁹-tetrahydrocannabivarinic acid (Δ⁹-THCVA), and cannabichromevarinic acid (CBCVA). Enzymes capable of carrying out these conversions include the C. sativa CBDA synthase, THCA synthase, and CBCA synthase, respectively. Accordingly, in at least one embodiment, the present disclosure provides a recombinant host cell comprising a pathway capable of converting BA to CBGVA and further comprising an enzyme capable of catalyzing the conversion of (v) CBGVA to Δ⁹-THCVA; (vi) CBGVA to CBDVA; and/or (vii) CBGVA to CBCVA. Thus, in at least one embodiment, the recombinant host cell comprises pathway capable of converting BA to CBGVA further comprises further comprises enzymes capable of catalyzing a reaction (v), (vi), and/or (vii):

[chemical structure]

[0113] Exemplary enzymes capable of catalyzing reaction (v)-(vii) as shown above are: (v) THCA synthase (THCAS); (vi) CBDA synthase (CBDAS); and (vii) CBCA synthase (CBCAS). Exemplary THCAS, CBDAS, and CBCAS enzymes are provided in Table 1.

[0114] Furthermore, as shown in FIG. 4, the rare cannabinoid acids, CBDVA, Δ⁹-THCVA, and CBCVA, can undergo a further decarboxylation reaction to provide the varin cannabinoid products, cannabidivarin (CBDV), Δ⁹-tetrahydrocannabivarin (Δ⁹-THCV), and cannabichromevarin (CBCV), respectively. In some embodiments, this further decarboxylation can be carried out under in vitro reaction conditions using the cannabinoid acids isolated from the recombinant host cells.

[0115] Similarly, as shown in FIGS. 1 and 3, a heterologous cannabinoid pathway comprising the sequence of at least the four enzymes AAE, OLS, OAC, and PT (wherein, the PT is a recombinant polypeptide having prenyltransferase activity of the present disclosure) is capable of converting a precursor substrate compound, such as hexanoic acid (HA) to an initial cannabinoid compound, such as cannabigerolic acid (CBGA) or CBGVA. These initial cannabinoid product compounds can themselves be used as a substrate for the in vitro biosynthesis of a range of further cannabinoid product compounds, such as THCA and THCVA, as shown in FIGS. 2 and 4. A wide range of cannabinoid compounds, such as those shown in Table 1, are contemplated for in vivo biosynthetic production in a recombinant host cell of the present disclosure or via a partial or full in vitro biosynthesis process using recombinant polypeptides of the present disclosure.

[0116] As described herein, the heterologous cannabinoid pathways of the present disclosure can be incorporated (e.g., by recombinant transformation) into a range of host cells to provide a system for biosynthetic production of cannabinoids (e.g., CBGA, CBGVA, CBDA, CBDVA, THCA, THCVA). Generally, the host cell used in the recombinant host cells of the present disclosure can be any cell that can be recombinantly modified with nucleic acids and cultured to express the recombinant products of those nucleic acids, including polypeptides and metabolites produced by the activity of the recombinant polypeptides. A wide range of suitable sources of host cells are known in the art, and exemplary host cell sources useful as recombinant host cells of the present disclosure include, but are not limited to, Saccharomyces cerevisiae, Yarrowia lipolytica, Pichia pastoris, and Escherichia coli. It is also contemplated that the host cell source for a recombinant host cell of the present disclosure can include a non-naturally occurring cell source, e.g., an engineered host cell. For example, a non-naturally occurring source host cell, such as a yeast cell previously engineered for improved production of recombinant genes, may be used to prepare the recombinant host cell of the present disclosure.

[0117] The recombinant host cells of the present disclosure comprise heterologous nucleic acids encoding a pathway of enzymes capable of producing a cannabinoid precursor (e.g., OA or DA), and a heterologous nucleic acid comprising a sequence encoding a recombinant polypeptide having prenyltransferase activity capable of prenylating the cannabinoid precursor substrate using GPP as a co-substrate to form a cannabinoid product (e.g., CBGA or CBGVA). As described elsewhere herein, nucleic acid sequences encoding the cannabinoid pathway enzymes, are known in the art, and provided herein, and can readily be used in accordance with the present disclosure. Typically, the nucleic acid sequence encoding enzymes which form a part of a cannabinoid pathway, further include one or more additional nucleic acid sequences, for example, a nucleic acid sequence controlling expression of the enzymes which form a part of a cannabinoid biosynthetic enzyme pathway, and these one or more additional nucleic acid sequences together with the nucleic acid sequence encoding the enzyme can be considered a heterologous nucleic acid sequence. A variety of techniques and methodologies are available and well known in the art for introducing heterologous nucleic acid sequences, such as nucleic acid sequences encoding the cannabinoid pathway enzymes (e.g., AAE, OLS, OAC, and PT), into a host cell so as to attain expression the host cell. The introduction of the heterologous nucleic acids can include integration of the nucleic acids into specific loci (e.g., the NDE1, XII-5, Gal80, ROQ1 loci in yeast) in the genome of a host cell via CRISPR-Cas9 and other techniques, some of which are demonstrated in the Examples herein. Such techniques are well known to the skilled artisan and can, for example, be found in Sambrook and other well-known sources. The number of copies of heterologous pathway genes and their locus of integration in a recombinant host cell's genome can result in improved biosynthetic production of a desired pathway product. Accordingly, it is contemplated that in the recombinant host cells of the present disclosure, the heterologous nucleic acid encoding the recombinant polypeptide having prenyltransferase activity can be integrated in the host cell's genome at one or more loci, including but not limited to the well-known yeast genome loci of NDE1, XII-5, Gal80, ROQ1. In at least one embodiment, the heterologous nucleic acid encoding the prenyltransferase activity (and/or other cannabinoid pathway activities) can be integrated in the host cell genome at two loci selected from: XII-5 and NDE1; or ROQ1 and NDE1.

[0118] One of ordinary skill will recognize that the heterologous nucleic acids encoding the recombinant prenyltransferase enzymes and/or other pathway enzymes will further comprise transcriptional promoters capable of controlling expression of the enzymes in the recombinant host cell. Generally, the transcriptional promoters are selected to be compatible with the host cell, so that promoters obtained from bacterial cells are used when a bacterial host cell is selected in accordance herewith, while a fungal promoter is used when a fungal host cell is selected, a plant promoter is used when a plant cell is selected, and so on. Promoters useful in the recombinant host cells of the present disclosure may be constitutive or inducible, provided such promoters are operable in the host cells. Promoters that may be used to control expression in fungal host cells, such as Saccharomyces cerevisiae, are well known in the art and include, but are not limited to: inducible promoters, such as a Gal1 promoter or Gal10 promoter, a constitutive promoter, such as an alcohol dehydrogenase (ADH) promoter, a glyceraldehyde-3-phosphate dehydrogenase (GPD) promoter, or an S. pombe Nmt, or ADH promoter. Exemplary promoters that may be used to control expression in bacterial cells can include the Escherichia coli promoters lac, tac, trc, trp or the T7 promoter. Exemplary promoters that may be used to control expression in plant cells include, for example, a Cauliflower Mosaic Virus 35S promoter (Odell et al. (1985) Nature 313:810-812), a ubiquitin promoter (U.S. Pat. No. 5,510,474; Christensen et al. (1989)), or a rice actin promoter (McElroy et al. (1990) Plant Cell 2:163-171). Exemplary promoters that can be used in mammalian cells include, a viral promoter such as an SV40 promoter or a metallothionine promoter. All of these host cell promoters are well known by and readily available to one of ordinary skill in the art. Further nucleic acid control elements useful for controlling expression in a recombinant host cell can include transcriptional terminators, enhancers, and the like, all of which may be used with the heterologous nucleic acids incorporate in the recombinant host cells of the present disclosure.

[0119] A wide variety of techniques are well known in the art for linking transcriptional promoters and other control elements to heterologous nucleic acid sequences encoding cannabinoid pathway genes. Such techniques are described in e.g., Sambrook et al., Molecular Cloning, a Laboratory Manual, Cold Spring Harbor Laboratory Press, 2012, Fourth Ed. Accordingly, in at least one embodiment, the heterologous nucleic acid sequences of the present disclosure comprise a promoter capable of controlling expression in a host cell, wherein the promoter is linked to a nucleic acid sequence encoding a recombinant polypeptide having prenyltransferase activity of the present disclosure, and as necessary, other enzymes constituting a cannabinoid pathway (e.g., AAE, OLS, OAC). This heterologous nucleic acid sequence can be integrated into a recombinant expression vector which ensures good expression in the desired host cell, wherein the expression vector is suitable for expression in a host cell, meaning that the recombinant expression vector comprises the heterologous nucleic acid sequence linked to any genetic elements required to achieve expression in the host cell. Genetic elements that may be included in the expression vector in this regard include a transcriptional termination region, one or more nucleic acid sequences encoding marker genes, one or more origins of replication, and the like. In some embodiments, the expression vector further comprises genetic elements required for the integration of the vector or a portion thereof in the host cell's genome.

[0120] It is also contemplated that in some embodiments an expression vector comprising a heterologous nucleic acid of the present disclosure may further contain a marker gene. Marker genes useful in accordance with the present disclosure include any genes that allow the distinction of transformed cells from non-transformed cells, including all selectable and screenable marker genes. A marker gene may be a resistance marker such as an antibiotic resistance marker against, for example, kanamycin or ampicillin. Screenable markers that may be employed to identify transformants through visual inspection include β-glucuronidase (GUS) (U.S. Pat. Nos. 5,268,463 and 5,599,670) and green fluorescent protein (GFP) (Niedz et al., 1995, Plant Cell Rep., 14: 403).

[0121] In at least one embodiment, the present disclosure also provides of a method for producing a cannabinoid, wherein a heterologous nucleic acid encoding a recombinant polypeptide having prenyltransferase activity (e.g., an exemplary engineered polypeptide of Table 3) can be introduced into a recombinant host cell. The recombinant host cell can then be used for production of the polypeptide, or incorporated in a biocatalytic process that utilized the prenyltransferase activity of the recombinant polypeptide expressed by the host cell for the catalytic prenylation of a substrate, e.g., the prenylation of OA with GPP to produce CBGA. In at one embodiment, the recombinant host cell can further comprise a pathway of enzymes capable of producing a cannabinoid precursor (e.g., OA or DA) which can act as a substrate for the recombinant polypeptide with prenyltransferase activity. It is contemplated that a recombinant host cell comprising a heterologous nucleic acid encoding a recombinant polypeptide having prenyltransferase activity of the present disclosure can provide improved biosynthesis of a desired cannabinoid (e.g., CBGA) product in terms of titer, yield, and production rate, due to the improved characteristics of the expressed prenyltransferase activity in the cell associated with the amino acid and codon differences engineered in the gene.

[0122] Accordingly, in at least one embodiment, the present disclosure provides a method of producing a cannabinoid derivative, wherein the method comprises: (a) culturing in a suitable medium a recombinant host cell of the present disclosure; and (b) recovering the produced cannabinoid derivative. In at least one embodiment, the method of producing a cannabinoid derivative further contacting a cell-free extract of the culture containing the produced cannabinoid with a biocatalytic reagent or chemical reagent capable of converting the cannabinoid to a cannabinoid derivative. In at least one embodiment, the biocatalytic reagent is an enzyme capable of converting the produced cannabinoid to a different cannabinoid or a cannabinoid derivative compound. In at least one embodiment, the chemical reagent is capable of chemically modifying the produced cannabinoid to produce a different cannabinoid or a cannabinoid derivative compound. In at least one embodiment of the method for producing a cannabinoid, the method can further comprise contacting a cell-free extract of the culture containing the produced cannabinoid with a biocatalytic reagent or chemical reagent.

[0123] It is contemplated that the cannabinoid, or cannabinoid derivative produced using the methods of the present disclosure can be produced and/or recovered from the reaction in the form of a salt. In at least one embodiment, the recovered salt of the cannabinoid, cannabinoid precursor, cannabinoid precursor derivative, or cannabinoid derivative is a pharmaceutically acceptable salt. Such pharmaceutically acceptable salts retain the biological effectiveness and properties of the free base compound.

[0124] It also is contemplated the recombinant polypeptides with prenyltransferase activity of the present disclosure can be incorporated in any biosynthesis method requiring a prenyltransferase catalyzed biocatalytic step. Thus, in at least one embodiment, the recombinant polypeptides having prenyltransferase activity (e.g., exemplary polypeptides of Table 3) can be used in a method for preparing a cannabinoid compound of structural formula (I)

[chemical structure]

wherein, R¹ is C1-C7 alkyl, wherein the method comprises contacting an recombinant polypeptide having prenyltransferase activity of the present disclosure (e.g., an exemplary recombinant of Table 3) under suitable reactions conditions, with geranyl pyrophosphate (GPP) and a cannabinoid precursor compound of structural formula (II)

[chemical structure]

wherein, R¹ is C1-C7 alkyl.

[0125] Exemplary conversions of cannabinoid precursor compounds of structural formula (II) to cannabinoid compounds of structural formula (I) that are catalyzed by the recombinant polypeptides having prenyltransferase activity of the present disclosure include: (1) conversion of divarinic acid (DA) to cannabigerovarinic acid (CBGVA); and (2) conversion of olivetolic acid (OA) to cannabigerolic acid (CBGA). It is contemplated that the recombinant polypeptides having prenyltransferase activity of the present disclosure (e.g., polypeptides disclosed in Table 3) can catalyze the conversion of other cannabinoid precursor compounds that are structural analogs of DA and OA, including but not limited to the exemplary cannabinoid precursor compounds listed in Table 2. Accordingly, in at least one embodiment of the biosynthesis method for conversion a cannabinoid precursor compound of structural formula (II) to a cannabinoid compound of structural formula (I), the compound of structural formula (II) is olivetolic acid (OA) and the compound of structure formula (I) is cannabigerolic acid (CBGA). In at least one embodiment, the compound of structural formula (II) is divarinic acid (DA) and the compound of structure formula (I) is cannabigerovarinic acid (CBGVA).

[0126] Suitable reaction conditions for the biosynthesis of cannabinoids are known in the art, and can be used with the recombinant polypeptides having prenyltransferase activity of the present disclosure. Additionally, suitable reaction conditions for the exemplary polypeptides of the present disclosure can be determined using routine techniques known in the art for optimizing biocatalytic reactions. It is contemplated that various ranges of suitable reaction conditions with the recombinant polypeptides of the present disclosure, including but not limited to ranges of pH, temperature, buffer, solvent system, substrate loading, polypeptide loading, co-substrate or co-factor loading, atmosphere, and reaction time. Suitable reaction conditions can be readily determined and optimized for particular reactions by routine experimentation that includes, but is not limited to, contacting the recombinant polypeptide and substrate under experimental reaction conditions of concentration, pH, temperature, solvent conditions, and detecting the production of the desired compound of structural formula (I). In at least one embodiment, the suitable reaction conditions comprise a reaction solution of ˜pH 7-8, a temperature of 25 C to 37 C; optionally, the reaction conditions comprise a reaction solution of pH 7 and a temperature of ˜30 C. In at least one embodiment, the reaction solution is allowed to incubate at a temperature of 25 C to 37 C for a reaction time of at least 1, 6, 12, 24, or 48 hours, before the amount of reaction product is determined.

[0127] The present disclosure also contemplates that the methods for biocatalytic conversion of a cannabinoid precursor compound of structural formula (II) to a cannabinoid compound of structural formula (I) using an recombinant polypeptide having prenyltransferase activity of the present disclosure can comprise additional chemical or biocatalytic steps carried out on the product compound of structural formula (II), including steps of product compound work-up, extraction, isolation, purification, and/or crystallization, each of which can be carried out under a range of conditions.

### EXAMPLES

[0128] Various features and embodiments of the disclosure are illustrated in the following representative examples, which are intended to be illustrative, and not limiting. Those skilled in the art will readily appreciate that the specific examples are only illustrative of the invention as described more fully in the claims which follow thereafter. Every embodiment and feature described in the application should be understood to be interchangeable and combinable with every embodiment contained within.

### Example 1: Preparation and Screening of Engineered Polypeptides with Improved Prenyltransferase Activity

[0129] This example illustrates preparation of site saturation mutagenesis libraries of polypeptides derived from the parent polypeptide, CsdPT4, of SEQ ID NO: 20 and screening for improved activity in the conversion of OA to CBGA relative to the activity of the parent polypeptide of SEQ ID NO: 20.

[0130] Materials and Methods

[0131] A. Site Saturation Mutagenesis (SSM) Library Build:

[0132] The polynucleotide sequence encoding a CsdPT4 polypeptide (SEQ ID NO: 20) from Cannabis sativa was codon optimized as SEQ ID NO: 19 and synthesized as a N-terminal fusion with a gene (SEQ ID NO: 525) encoding the ERG20_{WW} polypeptide (SEQ ID NO: 526). The synthetic gene (SEQ ID NO: 527) encoding the complete ERG20_{WW}-CsdPT4 fusion (SEQ ID NO: 528) was expressed under the Gal1 promoter (SEQ ID NO: 529) and the CYC1 terminator sequence (SEQ ID NO: 530). This synthetic gene was integrated as a knock-in using CRISPR-Cas9 at the NDE1 site in a parent yeast strain, which already had integrated genes encoding the cannabinoid pathway enzyme activities of AAE, OLS, and OAC. The resulting strain, EVP001, integrated with the cannabinoid pathway and the ERG20_{WW}-CsdPT4 gene was used as a control strain in screening the saturation mutagenesis library strains for fold-improvement in CBGA titer as described below. A further screening strain was built by integrating the m-Venus cassette as a N-terminal fusion with the ERG20_{WW} gene encoding the ERG20_{WW}-m-Venus polypeptide at the NDE1 site expressed under the Gal1 promoter (SEQ ID NO: 529) and the CYC1 terminator sequence (SEQ ID NO: 530), thereby replacing the previously integrated CsdPT4 gene (SEQ ID NO: 19). This resulting EVP000 strain was no longer capable of converting OA to CBGA.

[0133] Genomic DNA from a strain, with the ERG20_{WW}-CsdPT4 fusion integrated at NDE1 site (EVP001), was used as the template to generate two PCR products: (1) a first PCR product (Fragment A), which does not harbor any degenerate codons, and (2) a second PCR product (Fragment B), which has sequence overlap with the Fragment A, and is amplified harboring one NNK degenerate codon only. Primers used for amplification of Fragments A and B and overlap extension were designed according to standard site-saturation mutagenesis protocols. Fragment B was amplified with a series of forward primers that included the single NNK degenerate codon scanned across the various desired positions and a single reverse primer of SEQ ID NO: 532. Fragment A was amplified using a single forward primer of SEQ ID NO: 533 and a series of reverse primers designed according to the location of the mutagenesis site. The two fragments A and B were further assembled by overlap extension PCR using forward primer of SEQ ID NO: 534 and reverse primer of SEQ ID NO: 535. The assembled OE-PCR products were then pooled, and gel purified to provide a saturation mutagenesis library of linear donor DNA.

[0134] The pooled saturation mutagenesis library of linear donor DNA was transformed in a yeast strain, EVP000, for screening which, like EVP001, already had integrated genes encoding the cannabinoid pathway enzyme activities of AAE, OLS, and OAC. The library of linear donor DNA was integrated in EVP000 as a knock-in using CRISPR-Cas9 to replace the m-Venus cassette having an ORF of SEQ ID NO: 531 located at the NDE1 site under control the Gal1 promoter and CYC1 terminator.

[0135] B. Screening of Site Saturation Mutagenesis Library for Cannabinoid Biosynthesis:

[0136] Individual clones from the saturation mutagenesis library integrated into EVP000, and the EVP001 control strain were picked and grown in 0.3 mL YPD in 96-well plates. The culture plates were incubated in shaking incubators for 48 h at 30 C, 85% humidity, and 250 rpm. Cultures were then sub-cultured into 0.27 mL fresh YPD and fed with hexanoic acid (HA) to 2 mM final concentration. Subculture plates were grown in shaking incubators for 48 hours at 30 C, 85% humidity, and 250 rpm. The whole broth from these sub-culture plates was extracted and analyzed for the presence of the cannabinoid precursor compound, OA, and the cannabinoid product, CBGA, using HPLC, as described below.

[0137] 1. HPLC sample preparation: The whole broth of the culture was extracted and diluted with MeOH for sample preparation. The prepared samples were loaded onto RapidFire365 coupled with a triple quadruple mass spectrometry detector. Metabolites OA and CBGA were detected using MRM mode. Calibration curves of OA and CBGA were generated by running serial dilutions of standards, and then used to calculate concentrations of each metabolite.

[0138] 2. HPLC instrumentation and parameters: HPLC system: Agilent RapidFire 365; Column: Agilent Cartridge C18 (12 μl, type C); Mobile phase: Pump 1 uses 95:5 H₂O:acetonitrile with 0.1% formic acid at 1 mL/min; Pump 2 uses 20:80 acetonitrile:H₂O at 0.8 mL/min; Pump 3 uses MeOH with 0.1% formic acid at 0.8 mL/min; Aqueous wash uses H₂O; Organic wash uses acetonitrile; RapidFire cycle time: Aspiration 600 ms; Load/wash 3000 ms; Extra wash 2000 ms; Elute 4000 ms; Re-equilibration 500 ms.

[0139] C. Sequencing

[0140] Those clones from the saturation mutagenesis library determined by screening to exhibit an increased CBGA titer compared to the control, were re-tested and sequenced using Sanger sequencing technology to determine the respective specific codon and amino acid differences.

[0141] D. Results

[0142] Screening data from the saturation mutagenesis library strains in terms of fold-improvement in production of CBGA titer from HA feeding (FIOPC), relative to the control strain, EVP001, which expresses the parent CsdPT4 polypeptide of SEQ ID NO: 20, are summarized in Table 5 (below).

TABLE 5

| NT | AA | AA Substitution and/or | FIOPC |
|---|---|---|---|
| SEQ | SEQ | NT Codon Change | (relative |
| ID NO: | ID NO: | (relative to CsdPT4) | to CsdPT4) |
| 19 | 20 | n/a | 1.0 |
| 21 | 22 | F134G (TTT > GGG), | 3.83 |
| | | S175V (TCT > GTG) | |
| 23 | 24 | I79C | 2.04 |
| 25 | 26 | E106R (GAA > CGG), | 1.26 |
| | | A182 (GCA > GCC) | |
| 27 | 28 | W61A | 1.06 |
| 29 | 30 | S175V (TCT > GTT) | 2.19 |
| 31 | 32 | G58S, F73 (TTT > TTC) | 1.45 |
| 33 | 34 | W61V | 1.29-1.47 |
| 35 | 36 | F64M | 1.25-1.30 |
| 37 | 38 | F64L | 1.27 |
| 39 | 40 | F134G (TTT > GGT) | 1.19 |
| 41 | 42 | I79A (ATC > GCT) | 2.88 |
| 43 | 44 | S177A | 1.9 |
| 45 | 46 | F173I | 1.26 |
| 47 | 48 | W153L (TGG > TTG) | 2.80 |
| 49 | 50 | F64G | 1.14 |
| 51 | 52 | I79S | 1.02 |
| 53 | 54 | G119 (GGG > GGT) | 0.87 |
| 55 | 56 | R152 (AGA > CGT) | 1.36 |
| 57 | 58 | G139 (GGT > GGG) | 1.72 |
| | | S175V (TCT > GTG) | |
| 59 | 60 | M80V | 1.26 |
| 61 | 62 | I79A (ATC > GCG) | 2.07 |
| 63 | 64 | S181R | 1.42 |
| 65 | 66 | S177G (TCA > GGT) | 1.41 |
| 67 | 68 | I113W | 1.72 |
| 69 | 70 | F134G (TTT > GGG) | 1.12 |
| 71 | 72 | E106R (GAA > CGG) | 1.28 |
| 73 | 74 | W153L (TGG > CTG) | 2.50 |
| 75 | 76 | T180R | 2.67 |
| 77 | 78 | S175T | 1.91 |
| 79 | 80 | R46K, F64T | 3.19 |
| 81 | 82 | S177G (TCA > GGG) | 1.34 |
| 83 | 84 | F132F (TTC > TTT) | 1.92 |
| 85 | 86 | I165L | 1.52 |
| 87 | 88 | T180V | 1.52 |
| 89 | 90 | F75W | 1.67 |
| 91 | 92 | S177T | 2.13 |
| 93 | 94 | T180L | 0.57 |
| 95 | 96 | A293G | 0.94 |
| 97 | 98 | N235C | 1.73 |
| 99 | 100 | F161V (TTC > GTT), A293V | 1.52 |
| 101 | 102 | F158G (TTT > GGG) | 1.27 |
| 103 | 104 | S295A | 1.09-4.02 |
| 105 | 106 | E284R (GAA > CGG) | 1.3-2.15 |
| 107 | 108 | N50D, E284R (GAA > AGG) | 1.21-1.25 |
| 109 | 110 | V99A (GTT > GCG) | 1.37 |
| 111 | 112 | E284D | 1.03 |
| 113 | 114 | E284K (GAA > AAA), A291E | 2.64 |
| 115 | 116 | P294E | 1.15 |
| 117 | 118 | E284R (GAA > AGG) | 1.88 |
| 119 | 120 | Q82 (CAA > CAG) | 5.82 |
| 121 | 122 | A293K | 1.15 |
| 123 | 124 | D87E, V99A (GTT > GCG) | 1.32 |
| 125 | 126 | N235V | 1.38 |
| 127 | 128 | P97 (CCA > CCG) | 0.79 |
| 129 | 130 | F161V (TTC > GTT) | 1.70 |
| 131 | 132 | F158G (TTT > GGG) | 1.41-1.64 |
| 133 | 134 | E284K (GAA > AAG) | 2.31 |
| 135 | 136 | T229V | 0.90 |
| 137 | 138 | N235K | 1.27 |

[0143] As shown by the results in Table 5, the presence of the following amino acid differences in the recombinant polypeptides having prenyltransferase activity expressed in the strains from the EVP000 saturation mutagenesis libraries resulted in increased CBGA titer produced by the yeast strain: R46K, N50D, G58S, W61A, W61V, F64G, F64L, F64M, F64T, F75W, I179A, I79C, I79S, M80V, D87E, V99A, E106R, I113W, F134G, W153L, F158G, F161V, I165L, F173I, S175T/V, S177A, S177G, S177T, T180L, T180R, T180V, S181R, T229V, N235C, N235K, N235V, E284D, E284K, E284R, A291E, A293G, A293K, A293V, P294E, and S295A. Additionally, at least the following combinations of residue differences in the expressed recombinant polypeptides resulted in increased CBGA titer produced by the yeast strain: R46K and F64T; N50D and E284R; D87E and V99A; F134G and S175V; F161V and A293V; and E284K and A291E.

[0144] It also was observed that certain neutral (silent), codon changes, which did not result in an amino acid change in the recombinant polypeptide sequence, resulted in increased CBGA titer produced by the yeast strain. Specifically, the following codon differences at positions F73, Q82, P97, G119, F132, G139, R152, and A182: F73 (TTT>TTC); Q82 (CAA>CAG); P97 (CCA>CCG); G119 (GGG>GGT); F132F (TTC>TTT); G139 (GGT>GGG); R152 (AGA>CGT); and A182 (GCA>GCC).

### Example 2: Preparation and Screening of Engineered Polypeptides with Improved Prenyltransferase Activity

[0145] This example illustrates preparation of combinatorial mutagenesis libraries of polypeptides derived from the parent polypeptide, CsdPT4, of SEQ ID NO: 20 using both semi-synthetic and synthetic approaches, and screening for improved activity in the conversion of OA to CBGA relative to the activity of the parent polypeptide of SEQ ID NO: 20.

[0146] Materials and Methods

[0147] A. Combinatorial Library Builds:

[0148] The polynucleotide sequence encoding a CsdPT4 polypeptide (SEQ ID NO: 20) from Cannabis sativa was codon optimized as SEQ ID NO: 19 and synthesized as a N-terminal fusion with a gene (SEQ ID NO: 525) encoding the ERG20_{WW} polypeptide (SEQ ID NO: 526). The resulting synthetic gene (SEQ ID NO: 527) encoding the complete ERG20_{WW}-CsdPT4 fusion (SEQ ID NO: 528) was expressed under the Gal1 promoter (SEQ ID NO: 529) and the CYC1 terminator sequence (SEQ ID NO: 530). This synthetic gene was integrated as a knock-in using CRISPR-Cas9 at the NDE1 site in a parent yeast strain, which already had integrated genes encoding the cannabinoid pathway enzyme activities of AAE, OLS, and OAC. The resulting strain, EVP001, integrated with the cannabinoid pathway and the ERG20_{WW}-CsdPT4 gene was used as a control strain in screening the combinatorial mutagenesis library strains for fold-improvement in CBGA titer as described below. A further screening strain was built by integrating the m-Venus cassette as a N-terminal fusion with the ERG20_{WW}, encoding the ERG20_{WW}-m-Venus polypeptide at the Nde1 site expressed under the Gal1 promoter (SEQ ID NO: 529) and the CYC1 terminator sequence (SEQ ID NO: 530), thereby replacing the previously integrated CsdPT4 gene (SEQ ID NO: 19). This resulting EVP000 strain was no longer capable of converting OA to CBGA.

[0149] Semi-synthetic approach: A semi synthetic approach was used to construct the first set of combinatorial libraries. Genomic DNA from a strain with the ERG20_{WW}-CsdPT4 fusion integrated at NDE1 site (EVP001), was used as the template to generate a PCR amplicon of CsdPT4 containing uracil using a dNTP mix comprising of the following deoxyribonucleotides: dATP, dGTP, dCTP, dTTP, dUTP. The resulting PCR product was gel purified and digested with Uracil-DNA Glycosylase and Endonuclease IV at 37 C for 2 hours, followed by 94 C for two minutes, to generate a pool of fragments in the range of 50-100 bases. These fragments were further combined with seven individual pools of synthesized oligonucleotides (up to 60 bases in length, containing one single amino acid change per oligo) in seven individual assembly PCR reactions to reassemble the full-length PCR product and incorporate mutagenic amino acid changes within each pool randomly. The combinatorial library was prepared by individually amplifying the seven assembled products using overlap extension PCR using forward primer of SEQ ID NO: 536 and reverse primer of SEQ ID NO:537. The seven pools of oligonucleotides are summarized in Table 6 below.

TABLE 6

| Pool | Oligo Sequences |
|---|---|
| #1 | SEQ ID NO: 538-562 |
| #2 | SEQ ID NO: 563-587 |
| #3 | SEQ ID NO: 588-612 |
| #4 | SEQ ID NO: 613-647 |
| #5 | SEQ ID NO: 648-681 |
| #6 | SEQ ID NO: 682-705 |
| #7 | SEQ ID NO: 706-723 |

[0150] The seven resulting PCR products were further pooled to prepare a single semi-synthetic combinatorial library of linear donor DNA.

[0151] Fully synthetic approach: A second, fully synthetic combinatorial library was designed using positions and mutations identified from the initial SSM screening described in Example 1. Amino acids positions in the original SSM screens where more than one amino acid mutation was identified to increase titer were included in the design. The final combinatorial library was synthesized to include combinations of the amino acid changes at 19 positions as summarized in Table 7 below.

TABLE 7

| Wild-type AA Position | Amino Acid Mutations |
|---|---|
| P5 | G, V |
| D10 | V, L, W |
| C41 | A, G, S |
| F49 | L, R, M |
| W61 | A, V |
| F64 | M, L, G, T, W |
| I79 | C, A |
| K125 | M, V, W |
| F158 | G, A |
| S175 | V, T, A, G |
| S177 | A, G, T |
| T180 | R, V, L |
| R190 | S, G, A, Q |
| S194 | V, A, L |
| N235 | C, V, K |
| F238 | W, L |
| C277 | M, A |
| E284 | R, D, K |
| A293 | G, V, K |

[0152] The following sequences were also synthesized at the 5′ and 3′ ends of the library to facilitate overlap and extension PCR to include homology sequences to facilitate integration:

5′ additional sequence:
(SEQ ID NO: 724)
AAGTTTACAAGAGAAGCAAAGGTAGCGGCAGCGGTAGCGGTAGCGGCAGC.
3′ additional sequence:
(SEQ ID NO: 725)
TGATCATGTAATTAGTTATGTCACGCTTACATTCACGCCCTCCCCCCACA.

[0153] The resulting combinatorial variants were pooled to prepare a single synthetic combinatorial library of linear donor DNA.

[0154] The pooled semi-synthetic and synthetic combinatorial libraries of linear donor DNA were transformed in a yeast strain, EVP000, which, like EVP001, already had integrated genes encoding the cannabinoid pathway enzyme activities of AAE, OLS, and OAC. The library of linear donor DNA was integrated in EVP000 as a knock-in using CRISPR-Cas9 to replace an m-Venus cassette having an ORF of SEQ ID NO: 531 located at the NDE1 site under control the Gal1 promoter and CYC1 terminator.

[0155] B. Screening of Semi-Synthetic and Synthetic Combinatorial Libraries for Cannabinoid Biosynthesis:

[0156] Individual clones from both the semi-synthetic combinatorial library and the synthetic combinatorial library integrated into EVP000, along with the EVP001 control strain were picked and grown in 0.3 mL YPD in 96-well plates. The culture plates were incubated in shaking incubators for 48 h at 30 C, 85% humidity, and 250 rpm. Cultures were then sub-cultured into 0.27 mL fresh YPD and fed with hexanoic acid (HA) to 2 mM final concentration. Subculture plates were grown in shaking incubators for 48 hours at 30 C, 85% humidity, and 250 rpm. The whole broth from these sub-culture plates was extracted and analyzed for the presence of the cannabinoid precursor compound, OA, and the cannabinoid product, CBGA, using HPLC, as described below.

[0157] 1. HPLC sample preparation: The whole broth of the culture was extracted and diluted with MeOH for sample preparation. The prepared samples were loaded onto RapidFire365 coupled with a triple quadruple mass spectrometry detector. Metabolites OA and CBGA were detected using MRM mode. Calibration curves of OA and CBGA were generated by running serial dilutions of standards, and then used to calculate concentrations of each metabolite.

[0158] 2. HPLC instrumentation and parameters: HPLC system: Agilent RapidFire 365; Column: Agilent Cartridge C18 (12 μl, type C); Mobile phase: Pump 1 uses 95:5 H2O:acetonitrile with 0.1% formic acid at 1 mL/min; Pump 2 uses 20:80 acetonitrile:H₂O at 0.8 mL/min; Pump 3 uses MeOH with 0.1% formic acid at 0.8 mL/min; Aqueous wash uses H₂O; Organic wash uses acetonitrile; RapidFire cycle time: Aspiration 600 ms; Load/wash 3000 ms; Extra wash 2000 ms; Elute 4000 ms; Re-equilibration 500 ms.

[0159] C. Sequencing

[0160] Those clones from each of the combinatorial libraries (semi-synthetic and fully synthetic) determined by screening to exhibit an increased CBGA titer compared to the control EVP001, were re-tested and sequenced using Sanger sequencing technology to determine the specific codon and amino acid differences.

[0161] D. Results

[0162] Strains were identified from screening the semi-synthetic and fully synthetic combinatorial libraries for fold-improvement in CBGA titer from HA feeding (FIOPC) relative to the control strain, EVP001, which expresses the parent CsdPT4 polypeptide of SEQ ID NO: 20. The engineered prenyltransferase polypeptides expressed in these improved strains, along with their specific amino acid substitutions and/or silent codon changes are summarized below in Tables 8 and 9, respectively.

TABLE 8

| NT SEQ | AA SEQ | AA Substitutions | Silent Codon | |
|---|---|---|---|---|
| ID NO: | ID NO: | (relative to CsdPT4) | Changes | FIOPC |
| 139 | 140 | P5G, H7C, C41S, F64T, F134G, S175V, S177A, | | 1.68 |
| | | G204S, L249A, S295A | | |
| 141 | 142 | H7C, D10V, C41A, R46K, F64T, I79C, K125W, | | 1.66 |
| | | F134G | | |
| 143 | 144 | H7C, D10V, I79C, F134G, S175T, S177A, T180R, | N160 | 1.63 |
| | | R190S, G204S | (AAT > AAC) | |
| 145 | 146 | P5G, H7C, D10V, T180R, G204S, S241F | 1213 | 1.56 |
| | | | (ATC > ATT) | |
| 147 | 148 | D10V, C41S, F64T, I79C, W153L, S175T, T180R, | L304 | 1.56 |
| | | G204S, L249A, C277M, F280R, Q281R, A291E, | (TTG > CTG) | |
| | | S295A, Y307H, A308E, E309V, Y310S | | |
| 149 | 150 | P5G, H7C, C41A, F64T, I79A, I113N, W153L, | | 1.52 |
| | | S175V, T180R, S194L, I197T, G204S | | |
| 151 | 152 | P5G, H7C, D10V, F64T, W153L, S175V, V188A, | | 1.49 |
| | | R190S | | |
| 153 | 154 | H7C, R46K, I79C, K125W, F134G, Y176S, S177A, | V224 | 1.48 |
| | | T180R, G204S, C277A, L278P, F280G, Q281R, | (GTT > GTC) | |
| | | T282P | | |
| 155 | 156 | H7C, C41S, R46K, I79C, K125W, S175T, S177T, | | 1.48 |
| | | T180R, R190S, G204S, S251A, C277M, Q281R, | | |
| | | A291E | | |
| 157 | 158 | P5G, C41A, K125W, W153L, S175T, S177A, | | 1.46 |
| | | T180R | | |
| 159 | 160 | H7C, S177T, T180R, S194V, G204A, S295A | | 1.45 |
| 161 | 162 | P5G, H7C, C41A, F64T, K125W, F134G, S177A, | F311 | 1.45 |
| | | G204S, C277A, F280R, F301S | (TTT > TTC) | |
| 163 | 164 | D10V, C41S, R46K, F134G, W153L, S177T, | | 1.44 |
| | | T180R, V188A, R190S, M205G, L249A, C277M, | | |
| | | F280R | | |
| 165 | 166 | P5G, H7C, D10V, F49L, R52P, K125W, W153L, | | 1.44 |
| | | S175V, S177T, T180R, S194L, G204S, M205G | | |
| 167 | 168 | H7C, D10V, C41A, R46K, R52P, S175V, S177A, | | 1.44 |
| | | T180R, V188A, G204S, M205G | | |
| 169 | 170 | P5G, H7C, I79C, F134G, W153L, S175V | | 1.43 |
| 171 | 172 | D10V, C41S, R46K, F134G, W153L, S175V, | | 1.42 |
| | | G204S | | |
| 173 | 174 | H7C, R46K, I79A, S177A, T180R, V188A, G204S | S166 | 1.41 |
| | | | (TCT > TCC) | |
| 175 | 176 | H7C, D10V, C41A, K125W, W153L, S175T, | T201 | 1.41 |
| | | V188S, R190S, M200R, M205G, S214C, D219V, | (ACT > ACG), | |
| | | V243A, S251C, S264Y, Q281R, A288P | G218 | |
| | | | (GGT > GGG), | |
| | | | G242 | |
| | | | (GGT > GGC), | |
| | | | F276 | |
| | | | (TTC > TTT) | |
| 177 | 178 | H7C, K125W, S175V, S177T, T180R, S194L, | Y306 | 1.4 |
| | | G204S, S251A, S295A | (TAC > TAT) | |
| 179 | 180 | H7C, D10V, C41A, R46K, V68D, I79A, W153L, | | 1.38 |
| | | S175V, S177T, T180R, V188A, R190S, G204S, | | |
| | | M205G | | |
| 181 | 182 | P5G, R46K, R52P, F64T, L249A, E284R, A291E, | G119 | 1.37 |
| | | S295A | (GGT > GGC) | |
| 183 | 184 | P5G, H7C, C41S, R46K, K125W, F134G, I165T, | Y306 | 1.37 |
| | | S175T, S177T, T180R, G204S, Q281R, S295A | (TAT > TAC) | |
| 185 | 186 | H7C, D10V, C41A, F64T, W153L, S175V, S177A, | | 1.37 |
| | | T180R, M205G | | |
| 187 | 188 | P5G, C41S, R52P, I79C | | 1.37 |
| 189 | 190 | P5G, H7C, R52P, I79A, F134G, W153L, G204S, | | 1.37 |
| | | M205G, L249A, C277A, F280R, Q281R, A291E | | |
| 191 | 192 | D10V, R46K, W153L, T180R, S194V, L249A, | V261 | 1.36 |
| | | C277M, F280R, Q281R, A291E, S295A | (GTT > GTC) | |
| 193 | 194 | D10V, C41S, K125W, F134G, S175V, S177A, | | 1.36 |
| | | T180R | | |
| 195 | 196 | P5G, D10V, C41S, K125W, F134G, T180R | | 1.36 |
| 197 | 198 | H7C, I79A, K125W, W153L, S175T, T180R, | | 1.36 |
| | | R190S, M205G, L249A, S251A, C277A, F280R, | | |
| | | A291E | | |
| 199 | 200 | P5G, H7C, D10V, C41S, R46K, I121T, K125W, | | 1.35 |
| | | F134G, W153L, S175V, S177T, T180R, V188A, | | |
| | | R190S, M205G | | |
| 201 | 202 | P5G, C41S, S175V, S177A, T180R, L249A, C277A | | 1.35 |
| 203 | 204 | H7C, D10V, F49L, I79C, W153L, S175V, S177T, | | 1.34 |
| | | T180R, V188A, S194L | | |
| 205 | 206 | P5G, H7C, C41S, F49L, R52P, F64T, I79C, | V133 | 1.34 |
| | | K125W, W153L, S175T, S177T, T180R, V188A, | (GTT > GTC) | |
| | | R190S, G204S, C277M, A291E | | |
| 207 | 208 | P5G, H7C, D10V, F64T, F134G, W153L, S177T, | | 1.34 |
| | | T180R, L249A, C277A, Q281R, A291E, S295A | | |
| 209 | 210 | H7C, D10V, I79C, S177A, T180R, V188A, R190S, | V99 | 1.33 |
| | | A291E, S295A | (GTT > GTC) | |
| 211 | 212 | H7C, D10V, C41S, R46K, I79A, K125W, S175V, | | 1.33 |
| | | T180R, R190S | | |
| 213 | 214 | P5G, H7C, D10V, I79C, K125W, S175V, S177T, | | 1.32 |
| | | R190S, G204S, M205G, L249A, S251A, C277M, | | |
| | | A291E | | |
| 215 | 216 | D10V, R46K, K125W, W153L, S175V, S177A, | | 1.31 |
| | | T180R, V188A, C277M, S295A | | |
| 217 | 218 | P5G, H7C, C41S, F64T, K125W, F134G, S175V, | | 1.31 |
| | | S177A, V188A, M205G | | |
| 219 | 220 | P5G, C41A, R46K, F134G, S175T, T180R, V188A, | Q155 | 1.31 |
| | | R190S | (CAA > CAG) | |
| 221 | 222 | H7C, D10V, C41A, R52P, K125W, F134G, S177T, | L111 | 1.31 |
| | | S194V | (TTA > TTG) | |
| 223 | 224 | P5G, D10V, R52P, I79C, K125W, W153L | | 1.31 |
| 225 | 226 | P5G, H7C, D10V, F49L, K125W, F134G, W153L, | | 1.29 |
| | | S194L, G204S, Q281R, S295A | | |
| 227 | 228 | P5G, R52P, F64T, I79C, D95N | K93 | 1.29 |
| | | | (AAG > AAA) | |
| 229 | 230 | P5G, H7C, I79A, I105V, S177A, T180R, S194V, | | 1.28 |
| | | M205G, Q281R, S295A, V314A | | |
| 231 | 232 | D10V, C41S, R46K, R52P, F64T, F134G, S177A, | | 1.28 |
| | | T180R | | |
| 233 | 234 | P5G, D10V, R46K, R52P, F64T, I79C, K125W, | | 1.28 |
| | | W153L, T180R | | |
| 235 | 236 | H7C, C41S, R52P, I79C, K125W, F134G, W153L, | | 1.28 |
| | | S175T, T180I, V188A, R190S, L249A, S251A, | | |
| | | F280R, Q281R, S295A | | |
| 237 | 238 | H7C, D10V, K125W, F134G, W153L, S175T, | V33 | 1.27 |
| | | S177T | (GTT > GTC) | |
| 239 | 240 | P5G, C41S, R46K, K125W, F134G, W153L, | | 1.27 |
| | | S175T, S177A, S194V | | |
| 241 | 242 | P5G, D10V, I79A, K125W, F134G, S175V, C277M, | | 1.26 |
| | | Q281R, A291E, S295A | | |
| 243 | 244 | P5G, D10V, C41A, R46K, R52P, F134G, W153L, | A78 | 1.26 |
| | | S175T, S177T, M205G, L249A, S251A, F280R, | (GCA > GCG) | |
| | | Q281R, A291E | | |
| 245 | 246 | P5G, C41S, I79C, W153L, S175T, M205G, L249A, | | 1.26 |
| | | S251A, C277A, F280R, A291E, Y313P | | |
| 247 | 248 | P5G, H7C, D10V, C41A, R52P, T123K, K125W | | 1.25 |
| 249 | 250 | P5G, D10V, C41A, R46K, K125W, F134G, W153L, | | 1.24 |
| | | S175V, S177T, T180R, G204S, M205G, S253P, | | |
| | | F280R, A291E, S295A, F315S | | |
| 251 | 252 | H7C, C41A, F49L, I79C, K125W, W153L, S177T | | 1.24 |
| 253 | 254 | P5G, H7C, C41A, S177A, T180R, M205G, L249A, | | 1.24 |
| | | S251A, C277A, A291E, S295A, F299L | | |
| 255 | 256 | H7C, D10V, C41S, F64T, S177A, V188A, M205G, | | 1.23 |
| | | L249A, S251A, A291E, S295A | | |
| 257 | 258 | H7C, D10V, R46K, F134V | | 1.23 |
| 259 | 260 | P5G, H7C, F49L, F64T, I79C, K125W, W153L, | | 1.23 |
| | | S175T, S194L, C277M, F280R, Q281R, A291E, | | |
| | | S295A | | |
| 261 | 262 | P5G, D10V, F64T, F134G, S175T, S177T, T180R, | | 1.23 |
| | | L249A, S251A, A291E | | |
| 263 | 264 | P5G, H7C, D10V, I79A, K125W, W153L, E284K, | K263 | 1.22 |
| | | A291E | (AAA > AAG) | |
| 265 | 266 | P5G, D10V, F49L, R52P, F134G, S194L, S251A, | | 1.21 |
| | | W258R, Q281R, A291E, S295A | | |
| 267 | 268 | H7C, D10V, C41S, I79C, F134G, V188A, R190S, | Y306 | 1.21 |
| | | S214C, A291E, S295A, F311S | (TAT > TAC), | |
| | | | V312 | |
| | | | (GTT > GTC) | |
| 269 | 270 | C41A, I79A, K125W, F134G, W153L, S175T, | | 1.21 |
| | | S177T, T180R | | |
| 271 | 272 | P5G, H7C, I79A, S175V, S177T, L249A, S251A, | | 1.2 |
| | | W258R, Q281R | | |
| 273 | 274 | H7C, D10V, C41A, R46K, F64T, V115A, K125W, | | 1.2 |
| | | T180R, C277A, F280R, S295A | | |
| 275 | 276 | D10V, C41A, R46K, R52P, F64T, K125W, F134G, | L111 | 1.2 |
| | | W153L, S177A, T180R, S214C, L249A, E284K, | (TTA > TTG), | |
| | | S295A, A308P | Y306 | |
| | | | (TAT > TAC) | |
| 277 | 278 | P5G, D10V, C41A, R46K, I79A, F134G, W153L, | | 1.2 |
| | | L249A, Q281R, S295A | | |
| 279 | 280 | P5G, H7C, R46K, K125W, S175V, S177T, T180R, | | 1.2 |
| | | M205G, L249A, E284K, S295A | | |
| 281 | 282 | D10V, C41S, R46K, F65L, K125W, W153L, S177A, | | 1.18 |
| | | T180R, S194L, L249A, S251A, C277A | | |
| 283 | 284 | C41A, R46K, I79C, K93N, K125W | | 1.18 |
| 285 | 286 | P5G, H7C, R52P, I79C, K125W, W153L, S177T, | | 1.16 |
| | | T180R, S194L | | |
| 287 | 288 | C41A, R46K, W153L, S175V, M205G | | 1.16 |
| 289 | 290 | H7C, R52P, W153L, S175V, G204S, M205G, | | 1.15 |
| | | C277M, Q281R, S295A | | |
| 291 | 292 | P5G, R52P, I79A, K125W | | 1.14 |
| 293 | 294 | P5G, H7C, D10V, C41S, F49L, R52P, F64T, | N160 | 1.14 |
| | | S175V, S177A, M205G | (AAT > AAC) | |
| 295 | 296 | P5G, F49L, I79A, S177T | | 1.14 |
| 297 | 298 | P5G, D10V, C41S, R46K, I79N, F134G, S175V, | | 1.13 |
| | | S177T, T180R, M205G, A291E, S295A | | |
| 299 | 300 | H7C, D10V, R46K, K125W, F158S, S175V, S177T, | | 1.13 |
| | | T180R, V188A, R190S, M205R, L249A, C277R, | | |
| | | F280R, Q281R, A291E, Y310S | | |
| 301 | 302 | P5G, H7C, C41A, R52P, F134G, W153L, S175T, | S225 | 1.11 |
| | | L249A, S251A, E284R, S295A, L305S | (TCA > TCG) | |
| 303 | 304 | H7C, C41S, R46K, K125W, S194L, Q281R, A291E | Y306 | 1.11 |
| | | | (TAT > TAC) | |
| 305 | 306 | H7C, F49L, K125W, F134G, S177T, M205G, | Y306 | 1.1 |
| | | E284R, A291E, S295A | (TAT > TAC) | |
| 307 | 308 | P5G, H7C, D10V, C41A, R46K, F134G, F144S, | S104 | 1.09 |
| | | W153L, G204S, L249A, S251A, C277M, F280R, | (TCA > TCT) | |
| | | Q281R | | |
| 309 | 310 | P5G, R46K, L54S, K125W, W153L, S175T, S177T, | Y306 | 1.09 |
| | | S214C, F276L, F280R, Q281R, A308P, Y310C, | (TAT > TAC) | |
| | | Y313H | | |
| 311 | 312 | P5G, D10V, R46K, I79C | | 1.07 |
| 313 | 314 | P5G, D10V, R46K, W153L, S175V, S177T, T180R, | Y306 | 1.07 |
| | | S214C, S251A, C277M, F280R, Q281R, S295A, | (TAT > TAC) | |
| | | F301S, I302L, W303C, L304R, Y310S, F311S | | |
| 315 | 316 | D10V, R46K, F64T, I79A, W153L, S177A, T180R, | L117 | 1.07 |
| | | S194L, S251A, S295A | (TTG > CTG) | |
| 317 | 318 | H7C, D10V, C41A, S175V, F193L | | 1.06 |
| 319 | 320 | H7C, C41A, R46K, R52P, K125W, F134G, S177T | | 1.06 |
| 321 | 322 | P5G, H7C, D10V, C41A, K125W, S194L, G204S, | L162 | 1.06 |
| | | M205G, F280R, A291E, S295A | (TTG > CTG), | |
| | | | Y306 | |
| | | | (TAT > TAC) | |
| 323 | 324 | P5G, F49L, R52P, K125W, F134G, W153L, S177T, | Y306 | 1.06 |
| | | R190S, M205G, S214C, F280R, A291E, S295A, | (TAT > TAC) | |
| | | V312G, Y313H | | |
| 325 | 326 | H7C, D10V, K125W, F134G | | 1.06 |
| 327 | 328 | D10V, F49L, R52P, F64T, W153L, S175V, S177A, | N74 | 1.06 |
| | | Q281R, S295A, F311P | (AAT > AAC), | |
| | | | Y306 | |
| | | | (TAT > TAC) | |
| 329 | 330 | C41S | | 1.05 |
| 331 | 332 | H7C, D10V, C41S, R46K, K125W, W153L, S194A | | 1.05 |
| 333 | 334 | R52P, F64T, I79C, F134G, S177A, T180R, L249A, | I37 | 1.05 |
| | | M267T, C277M, Q281R, L287F, A288P, Y290S | (ATT > ATC), | |
| | | | A233 | |
| | | | (GCA > GCG) | |
| 335 | 336 | D10V, F64T, I79C, K125W, F134G, I140T, S177A, | Y306 | 1.04 |
| | | L249A, C277M, Q281R, A291E | (TAT > TAC) | |
| 337 | 338 | D10V, K34E, F49L | | 1.04 |
| 339 | 340 | H7C, D10V, C41A, R46K, F64T, K125W, R190S, | L304 | 1.03 |
| | | M205G, C277A, S295A, Y307S, A308R, Y310S | (TTG > CTG), | |
| | | | Y306 | |
| | | | (TAT > TAC) | |
| 341 | 342 | P5G, H7C, D10V, C41G, K125W, F134G, L249V, | S295 | 1.02 |
| | | F280L, A291E | (TCA > TCT) | |
| 343 | 344 | P5G, F64T, I79C, W153L, I165T, Q281R, A291E, | | 1.02 |
| | | S295A | | |
| 345 | 346 | H7C, R46K, F64T, I91V, W153L, S175V, S177T, | Y306 | 1.02 |
| | | I196T, M205G, L249A, C277M, A291E, Y310P | (TAT > TAC) | |
| 347 | 348 | H7C, C41A, K125W, F134G, W153L, S175T, | | 1 |
| | | T180R, R190S, M205G, E217G | | |

TABLE 9

| NT SEQ | AA SEQ | AA Substitutions | Silent Codon | |
|---|---|---|---|---|
| ID NO: | ID NO: | (relative to CsdPT4) | Changes | FIOPC |
| 349 | 350 | P5G, D10W, C41G, F49M, W61A, F64W, I79A, | | 2.07 |
| | | K125M, F158G, S175A, S177A, T180L, R190S, | | |
| | | S194V, N235K, F238W, C277A, E284D, A293V | | |
| 351 | 352 | P5G, D10V, C41S, F49M, W61A, F64L, I79C, | | 2.01 |
| | | K125V, F158G, S175V, S177A, T180V, R190S, | | |
| | | S194V, N235C, F238L, C277A, E284K, A293K | | |
| 353 | 354 | P5G, D10V, C41A, F49L, W61A, F64G, I79C, | | 1.98 |
| | | K125V, F158G, S175A, S177T, T180V, R190S, | | |
| | | S194V, N235K, F238W, C277A, E284D, A293G | | |
| 355 | 356 | C41A, F49L, W61V, F64T, I79A, K125M, F158G, | | 1.95 |
| | | S175A, S177T, T180L, R190A, S194V, N235C, | | |
| | | F238W, C277A, E284D, A293G | | |
| 357 | 358 | P5G, D10L, C41A, F49L, W61A, F64T, I79C, | | 1.92 |
| | | K125M, F158G, S175A, S177T, T180R, R190S, | | |
| | | S194A, N235K, F238W, C277M, E284K, A293V | | |
| 359 | 360 | P5G, D10W, C41S, F49L, W61A, F64T, I79A, | | 1.88 |
| | | K125M, F158G, S175A, S177A, T180L, R190Q, | | |
| | | S194L, N235C, F238L, C277M, E284K, A293V | | |
| 361 | 362 | P5G, D10L, C41G, F49R, W61A, F64T, I79C, | | 1.88 |
| | | K125W, F158G, S175T, S177T, T180R, R190S, | | |
| | | S194L, N235K, F238L, C277A, E284D, A293G | | |
| 363 | 364 | P5V, D10L, C41A, F49L, W61A, F64W, I79A, | | 1.86 |
| | | K125V, F158G, S175V, S177T, T180R, R190A, | | |
| | | S194A, N235C, F238L, C277A, E284R, A293G | | |
| 365 | 366 | P5G, D10V, C41A, F49L, W61A, F64M, I79C, | | 1.85 |
| | | K125V, F158G, S175A, S177T, T180L, R190S, | | |
| | | S194V, N235C, F238W, C277M, E284R, A293G | | |
| 367 | 368 | P5G, D10W, C41A, F49L, W61A, F64G, I79C, | | 1.84 |
| | | K125W, F158G, S175T, S177T, T180R, R190S, | | |
| | | S194L, N235C, F238W, C277A, E284K, A293G | | |
| 369 | 370 | P5V, D10L, C41A, F49L, W61V, F64M, I79C, | | 1.81 |
| | | K125V, F158G, S175V, S177T, T180R, R190A, | | |
| | | S194A, N235C, F238W, C277M, E284K, A293V | | |
| 371 | 372 | P5G, D10L, N11D, C41G, F49L, W61V, F64W, | | 1.8 |
| | | I79C, K125M, F158G, S175A, S177T, T180V, | | |
| | | R190A, S194A, N235C, F238L, C277M, E284K, | | |
| | | A293G | | |
| 373 | 374 | P5G, D10V, C41A, F49R, W61A, F64M, I79C, | | 1.79 |
| | | K125W, F158G, S175A, S177A, T180R | | |
| 375 | 376 | P5V, D10V, C41S, F49M, W61A, F64M, I79A, | | 1.79 |
| | | K125W, F158G, S175A, S177G, T180R, R190S, | | |
| | | S194V, N235K, F238L, C277M, E284R, A293G | | |
| 377 | 378 | P5V, D10V, C41A, F49R, W61A, F64L, I79A, | | 1.77 |
| | | K125M, F158G, S175T, S177G, T180V, R190Q, | | |
| | | S194A, N235C, F238L, C277M, E284K, A293V | | |
| 379 | 380 | P5G, D10V, C41A, F49L, W61V, F64G, I79A, | | 1.76 |
| | | K125V, A129T, F158G, S175V, S177A, T180R, | | |
| | | R190Q, S194L, N235V, F238L, C277M, E284D, | | |
| | | A293G | | |
| 381 | 382 | P5G, D10V, C41A, F49L, W61V, F64L, I79A, | | 1.75 |
| | | K125V, F158G, S175A, S177T, T180L, R190A, | | |
| | | S194A, N11D, N235C, F238L, C277M, E284D, | | |
| | | A293G | | |
| 383 | 384 | P5V, D10V, C41A, F49L, W61V, F64T, I79C, | | 1.74 |
| | | K125M, F158G, S175A, S177A, T180L, R190Q, | | |
| | | S194A, N235V, F238W, C277M, E284K, A293G | | |
| 385 | 386 | P5V, D10W, C41S, F49M, W61A, F64L, I79A, | | 1.7 |
| | | K125W, F158G, S175A, S177T, T180V, R190S, | | |
| | | S194A, N235K, F238L, C277A, E284D, A293K | | |
| 387 | 388 | P5V, D10L, C41A, F49L, W61A, F64M, I79C, | V33 | 1.67 |
| | | K125M, F158G, S175A, S177A, T180L, R190S, | (GTT > GTA) | |
| | | S194L, N235C, F238L, C277A, E284R, A293G | | |
| 389 | 390 | P5G, D10V, C41S, F49L, W61V, F64L, I79A, | | 1.67 |
| | | K125W, F158G, S175A, S177G, T180R, R190S, | | |
| | | S194A, N235C, F238L, C277M, E284R, A293G | | |
| 391 | 392 | P5V, D10V, C41A, F49L, W61V, F64M, I79A, | | 1.64 |
| | | K125W, F158G, S175A, S177G, T180V, R190G, | | |
| | | S194A, N235C, F238W, C277A, E284R, A293V | | |
| 393 | 394 | P5V, D10V, C41S, F49M, W61V, F64G, I79C, | | 1.62 |
| | | K125W, F158A, S175T, S177G, T180V, R190S, | | |
| | | S194A, N235K, F238W, C277A, E284D, A293G | | |
| 395 | 396 | P5V, D10W, C41S, F49L, W61A, F64L, I79C, | 1137 | 1.59 |
| | | K125M, F138I, F158G, S175A, S177A, T180L, | (ATC > ATA) | |
| | | R190S, S194V, N235K, F238W, C277M, E284R, | | |
| | | A293G | | |
| 397 | 398 | C41S, F49R, W61A, F64L, I79C, K125V, F158A, | | 1.59 |
| | | S175V, S177A, T180R, R190S, S194L, N235C, | | |
| | | F238W, C277A, E284D, A293G | | |
| 399 | 400 | P5G, D10V, C41A, F49M, W61A, F64G, I79A, | | 1.58 |
| | | K125W, F158G, S175G, S177T, T180R, R190S, | | |
| | | S194V, N235K, F238L, C277A, E284R, A293G | | |
| 401 | 402 | P5G, D10V, C41S, F49L, W61A, F64G, I79A, | | 1.58 |
| | | K125W, F158G, S175A, S177G, T180L, R190Q, | | |
| | | S194V, N235C, F238W, C277M, E284K, A293G | | |
| 403 | 404 | P5G, D10V, C41S, F49M, W61A, F64M, I79A, | | 1.57 |
| | | K125W, F158A, S175A, S177T, T180V, R190S, | | |
| | | S194L, N235C, F238L, C277M, E284D, A293K | | |
| 405 | 406 | P5G, D10V, C41A, F49M, W61A, F64L, I79C, | | 1.54 |
| | | K125M, A129T, F158G, S175G, S177A, T180R, | | |
| | | R190A, S194L, N235K, F238L, C277A, E284D, | | |
| | | A293G | | |
| 407 | 408 | P5G, D10L, C41S, F49M, W61V, F64W, I79C, | | 1.53 |
| | | K125V, F158A, S175T, S177T, T180R, R190S, | | |
| | | S194A, N235K, F238L, C277A, E284R, A293G | | |
| 409 | 410 | P5V, D10W, C41G, F49R, W61V, F64T, I79A, | | 1.51 |
| | | K125V, F158G, S175T, S177A, T180V, R190S, | | |
| | | S194V, N235K, F238L, C277M, E284D, A293G | | |
| 411 | 412 | P5G, D10V, C41A, F49L, W61A, F64M, I79C, | | 1.49 |
| | | K125M, F158G, S175V, S177A, T180V, R190Q, | | |
| | | S194A, N235V, F238W, C277M, E284D, A293G | | |
| 413 | 414 | P5V, D10W, C41S, F49M, W61A, F64T, I79C, | | 1.47 |
| | | K125M, F158G, S175V, S177T, T180V, R190A, | | |
| | | S194A, N235K, F238W, C277A, E284D, A293K | | |
| 415 | 416 | C41A, F49L, W61A, F64T, I79A, K125M, F158A, | | 1.47 |
| | | S175V, S177G, T180R, R190Q, S194A, N235C, | | |
| | | F238W, C277M, E284D, A293G | | |
| 417 | 418 | P5G, D10L, C41S, F49M, W61V, F64M, I79C, | | 1.46 |
| | | K125W, F158A, S175A, S177G, T180R, R190S, | | |
| | | S194A, N235K, F238W, C277M, E284D, A293G | | |
| 419 | 420 | P5V, D10W, C41G, F49R, W61A, F64M, I79A, | | 1.45 |
| | | K125V, F158A, S175V, S177T, T180R, R190S, | | |
| | | S194V, N235C, F238L, C277M, E284R, A293K | | |
| 421 | 422 | P5V, D10V, C41A, F49L, W61V, F64M, I79A, | | 1.43 |
| | | K125W, F158A, S175A, S177G, T180R, R190S, | | |
| | | S194V, N235C, F238L, C277A, E284D, A293G | | |
| 423 | 424 | P5G, D10W, C41G, F49L, W61V, F64W, I79C, | | 1.43 |
| | | K125W, F158G, S175A, S177T, T180V, R190A, | | |
| | | S194A, N235V, F238W, C277M, E284K, A293K | | |
| 425 | 426 | P5G, D10V, C41S, F49M, W61V, F64W, I79A, | | 1.4 |
| | | K125W, F158G, S175V, S177T, T180R, R190Q, | | |
| | | S194A, N235C, F238L, C277A, E284D, A293K | | |
| 427 | 428 | P5G, D10L, C41G, F49L, W61A, F64M, I79A, | | 1.39 |
| | | K125V, F158A, S175A, S177G, T180V, R190G, | | |
| | | S194L, N235V, F238W, C277M, E284R, A286G, | | |
| | | A293G | | |
| 429 | 430 | P5G, D10W, C41A, F49L, W61A, F64M, I79A, | | 1.38 |
| | | K125W, F158G, S175G, S177T, T180L, R190Q, | | |
| | | S194A, N235K, F238L, C277A, E284R, A293G | | |
| 431 | 432 | P5V, D10L, C41S, F49L, W61A, F64L, I79C, | | 1.38 |
| | | K125M, F158A, S175G, S177A, T180R, R190Q, | | |
| | | S194V, N235C, F238L, C277M, E284R, A293G | | |
| 433 | 434 | C41S, F49L, W61A, F64M, I79A, K125M, F158A, | | 1.38 |
| | | S175V, S177T, T180R, R190G, S194L, N235V, | | |
| | | F238L, C277A, E284D, A293G | | |
| 435 | 436 | P5G, D10V, C41A, F49M, W61A, F64T, I79C, | | 1.37 |
| | | K125V, F158A, S175V, S177A, T180L, R190S, | | |
| | | S194A, N235V, F238W, C277M, E284R, A293G | | |
| 437 | 438 | P5G, D10V, C41G, F49R, W61A, F64T, I79A, | | 1.35 |
| | | K125W, F158A, S175G, S177T, T180L, R190S, | | |
| | | S194L, N235C, F238L, C277M, E284D, A293G | | |
| 439 | 440 | P5G, D10W, C41A, F49M, W61V, F64T, I79C, | | 1.35 |
| | | K125M, F158A, S175T, S177A, T180L, R190A, | | |
| | | S194L, N235C, F238W, C277M, E284D, A293G | | |
| 441 | 442 | P5G, D10L, C41A, F49L, W61A, F64L, I79A, | | 1.34 |
| | | K125W, F158A, S175G, S177T, T180V, R190A, | | |
| | | S194A, N235C, F238W, C277M, E284R, A293G | | |
| 443 | 444 | P5G, D10L, C41A, F49M, W61A, F64L, I79C, | | 1.33 |
| | | K125V, F158A, S175G, S177A, T180V, R190A, | | |
| | | F195V, S194L, N235C, F238W, C277A, E284D, | | |
| | | A293G | | |
| 445 | 446 | P5V, D10L, C41G, F49M, W61V, F64T, I79C, | | 1.33 |
| | | K125W, F158A, S175T, S177A, T180V, R190S, | | |
| | | S194V, N235C, F238W, C277A, E284D, A293G | | |
| 447 | 448 | P5G, D10W, C41S, F49L, W61V, F64L, I79A, | F141 | 1.33 |
| | | K125W, F158A, S175A, S177G, T180R, R190G, | (TTC > TTT) | |
| | | S194L, N235C, F238W, C277A, E284R, A293G | | |
| 449 | 450 | P5G, D10V, C41A, F49M, W61A, F64G, I79A, | | 1.33 |
| | | K125V, F158G, S175A, S177A, T180L, R190Q, | | |
| | | S194L, N235C, F238W, C277M, E284D, A293V | | |
| 451 | 452 | P5G, D10W, C41G, F49M, W61A, F64W, I79C, | | 1.3 |
| | | K125M, F158G, S175A, S177A, T180L, R190A, | | |
| | | S194L, N235K, F238W, C277M, E284D, A293G | | |
| 453 | 454 | P5V, D10W, C41G, F49L, W61A, F64W, I79C, | | 1.3 |
| | | K125V, F158G, S175G, S177G, T180L, R190S, | | |
| | | S194A, N235K, F238L, C277A, E284D, A293V | | |
| 455 | 456 | P5G, D10W, C41A, F49L, W61A, F64G, I79C, | | 1.29 |
| | | K125W, F158A, S175A, S177A, T180V, R190S, | | |
| | | S194A, N235K, F238W, C277A, E284R, A293V | | |
| 457 | 458 | P5V, D10L, C41S, F49L, W61A, F64M, I79A, | | 1.29 |
| | | K125W, F158A, S175A, S177A, T180L, R190S, | | |
| | | S194L, N235C, F238L, C277A, E284D, A293G | | |
| 459 | 460 | P5G, D10L, C41A, F49L, W61A, F64M, I79C, | | 1.28 |
| | | K125V, F158A, S175V, S177T, T180R, R190A, | | |
| | | S194A, N235C, F238W, C277M, E284K, A293G | | |
| 461 | 462 | P5G, D10V, C41S, F49L, W61A, F64T, I79C, | | 1.28 |
| | | K125M, F158A, S175T, S177T, T180L, R190Q, | | |
| | | S194L, N235C, F238L, C277A, E284D, A293G | | |
| 463 | 464 | K125W, F158A, S175A, S177T, T180L, R190Q, | | 1.28 |
| | | S194A, N235C, F238L, C277A, E284D, A293V | | |
| 465 | 466 | P5G, D10V, C41A, F49L, W61V, F64L, I79A, | | 1.27 |
| | | K125M, F158A, S175G, S177G, T180L, R190G, | | |
| | | S194V, N235K, F238L, C277A, E284R, A293K | | |
| 467 | 468 | P5V, D10L, C41G, F49L, W61V, F64T, I79C, | | 1.27 |
| | | K125V, F158G, S175G, S177T, T180R, R190S, | | |
| | | S194L, N235C, F238L, C277M, E284R, A293G | | |
| 469 | 470 | P5V, D10V, C41S, F49M, W61A, F64M, I79A, | | 1.26 |
| | | K125W, F158A, S175A, S177G, T180L, R190G, | | |
| | | S194A, N235C, F238L, C277A, E284D, A293V | | |
| 471 | 472 | P5G, D10W, C41S, F49M, W61A, F64W, I79C, | | 1.26 |
| | | K125W, F158A, S175A, S177A, T180R, R190S, | | |
| | | S194A, N235C, F238W, C277M, E284D, A293G | | |
| 473 | 474 | P5V, D10V, C41G, F49L, W61V, F64M, I79C, | | 1.23 |
| | | K125V, F158A, S175G, S177T, T180L, R190Q, | | |
| | | S194A, N235V, F238L, C277M, E284R, A293G | | |
| 475 | 476 | P5V, D10L, C41S, F49L, W61A, F64T, I79C, | | 1.23 |
| | | K125M, F158G, S175G, S177A, T180L, R190A, | | |
| | | S194A, N235C, F238L, C277M, E284K, A293G | | |
| 477 | 478 | P5G, D10V, C41A, F49L, W61A, F64G, I79C, | | 1.23 |
| | | K125W, F158A, S175A, S177T, T180R, R190S, | | |
| | | S194V, N235C, F238W, C277A, E284D, A293G | | |
| 479 | 480 | P5G, D10W, C41G, F49R, W61A, F64L, I79C, | | 1.21 |
| | | K125M, F158A, S175A, S177A, T180L, R190A, | | |
| | | S194V, N235C, F238W, C277M, E284D, A293V | | |
| 481 | 482 | C41A, F49L, W61V, F64L, I79A, K125V, F158G, | | 1.21 |
| | | S175G, S177G, T180L, R190G, S194A, N235V, | | |
| | | F238W, C277A, E284D, A293G | | |
| 483 | 484 | K125W, F158A, S175A, S177G, T180V, R190S, | | 1.19 |
| | | S194L, N235K, F238W, C277M, E284R, A293G | | |
| 485 | 486 | P5V, D10V, C41S, F49M, W61A, F64M, I79C, | | 1.18 |
| | | K125M, F158A, S175G, S177T, T180R, R190S, | | |
| | | S194A, N235V, F238W, C277A, E284R, A293G | | |
| 487 | 488 | P5G, D10W, C41A, F49L, W61A, F64L, I79C, | | 1.17 |
| | | K125W, F158A, S175A, S177G, T180V, R190A, | | |
| | | S194A, N235C, F238W, C277A, E284D, A293G | | |
| 489 | 490 | P5G, D10W, C41S, F49L, W61A, F64W, I79A, | | 1.17 |
| | | K125V, F158A, S175T, S177G, T180V, R190A, | | |
| | | S194L, N235V, F238L, C277M, E284D, A293V | | |
| 491 | 492 | P5V, D10W, C41G, F49L, W61A, F64G, I79A, | | 1.16 |
| | | K125M, F158A, S175G, S177A, T180L, R190S, | | |
| | | S194V, N235V, F238L, C277A, E284D, A293K | | |
| 493 | 494 | P5G, D10L, C41A, F49L, W61A, F64W, I79C, | | 1.16 |
| | | K125W, F158A, S175V, S177A, T180L, R190S, | | |
| | | S194L, N235K, F238W, C277M, E284D, A293G | | |
| 495 | 496 | P5V, D10L, C41G, F49R, W61V, F64M, I79A, | | 1.16 |
| | | K125W, F158A, S175T, S177A, T180L, R190Q, | | |
| | | S194L, N235C, F238W, C277M, E284K, A293V | | |
| 497 | 498 | P5V, D10W, C41G, F49L, W61A, F64G, I79A, | | 1.14 |
| | | K125V, F158A, S175T, S177G, T180V, R190Q, | | |
| | | S194V, N235V, F238W, C277M, E284K, A293G | | |
| 499 | 500 | P5V, D10W, C41G, F49R, W61A, F64L, I79A, | | 1.11 |
| | | K125M, F158G, S175G, S177A, T180L, R190S, | | |
| | | S194L, N235C, F238W, C277M, E284D, A293G | | |
| 501 | 502 | P5V, D10W, C41G, F49R, W61A, F64T, I79A, | | 1.07 |
| | | K125V, F158A, S175A, S177T, T180R, R190G, | | |
| | | S194V, N235K, F238W, C277M, E284D, A293G | | |
| 503 | 504 | P5G, D10W, C41S, F49L, W61A, F64T, I79C, | | 1.05 |
| | | K125V, F158A, S175G, S177A, T180L, R190S, | | |
| | | S194A, N235V, F238L, C277A, E284D, A293G | | |
| 505 | 506 | P5V, D10W, C41G, F49L, W61A, F64M, I79A, | | 1.05 |
| | | K125V, F158A, S175G, S177G, T180L, R190Q, | | |
| | | S194L, N235C, F238L, C277A, E284D, A293V | | |
| 507 | 508 | P5G, D10V, C41S, F49M, W61A, F64W, I79C, | | 1.04 |
| | | K125V, F158G, S175G, S177T, T180R, R190A, | | |
| | | S194L, N235C, F238L, C277M, E284R, A293G | | |
| 509 | 510 | P5G, D10V, C41G, F49R, W61V, F64M, I79A, | | 1.03 |
| | | K125V, F158G, S175G, S177G, T180V, R190S, | | |
| | | S194V, N235K, F238W, C277A, E284K, A293G | | |
| 511 | 512 | P5G, D10L, C41S, F49L, W61V, F64L, I79A, | | 1.02 |
| | | K125M, F158A, S175G, S177G, T180V, R190A, | | |
| | | S194A, N235K, F238W, C277M, E284D, A293G | | |
| 513 | 514 | F49R, W61V, F64M, I79A, K125W, F158A, S175G, | | 1.02 |
| | | S177A, T180V, R190Q, S194V, N235V, F238W, | | |
| | | C277M, E284R, A293G | | |

[0163] As shown by the results in Tables 8 and 9, the presence of the following amino acid differences in the recombinant polypeptides having prenyltransferase activity expressed in the strains from the semi-synthetic and fully synthetic libraries resulted in increased CBGA titer produced by the yeast strain: P5G, P5V, H7C, D10L, D10V, D10W, N11D, K34E, C41A, C41G, C41S, R46K, F49L, F49M, F49R, R52P, L54S, W61A, W61V, F64G, F64L, F64M, F64T, F64W, F65L, V68D, I179A, I79C, I79N, I91V, K93N, D95N, I105V, I113N, V115A, I121T, T123K, K125M, K125V, K125W, A129T, F134G, F134V, F138I, I140T, F144S, W153L, F158A, F158G, F158S, I165T, S175A, S175G, S175T, S175V, Y176S, S177A, S177G, S177T, T180I, T180L, T180R, T180V, V188A, V188S, R190A, R190G, R190Q, R190S, F193L, S194A, S194L, S194V, F195V, I196T, I197T, M200R, G204A, G204S, M205G, M205R, S214C, E217G, D219V, N235C, N235K, N235V, F238L, F238W, S241F, V243A, L249A, L249V, S251A, S251C, S253P, W258R, S264Y, M267T, F276L, C277A, C277M, C277R, L278P, F280G, F280L, F280R, Q281R, T282P, E284D, E284K, E284R, A286G, L287F, A288P, Y290S, A291E, A293G, A293K, A293V, S295A, F299L, F301S, I302L, W303C, L304R, L305S, Y307H, Y307S, A308E, A308P, A308R, E309V, Y310C, Y310P, Y310S, F311P, F311S, V312G, Y313H, Y313P, V314A, and F315S.

[0164] It also was observed that certain neutral (silent), codon changes, which did not result in an amino acid change in the recombinant polypeptide sequence of Tables 8 and 9, resulted in increased CBGA titer produced by the yeast strain. Specifically, as listed in Tables 8 and 9 the following silent codon changes were observed in the polynucleotide sequences encoding the polypeptides: V33 (GTT>GTC), I37 (ATT>ATC), F73 (TTT>TTC), N74 (AAT>AAC), A78 (GCA>GCG), Q82 (CAA>CAG), K93 (AAG>AAA), P97 (CCA>CCG), V99 (GTT>GTC), S104 (TCA>TCT), L111 (TTA>TTG), L117 (TTG>CTG), G119 (GGT>GGC), F132F (TTC>TTT), V133 (GTT>GTC), G139 (GGT>GGG), R152 (AGA>CGT), Q155 (CAA>CAG), N160 (AAT>AAC), L162 (TTG>CTG), S166 (TCT>TCC), A182 (GCA>GCC), T201 (ACT>ACG), I213 (ATC>ATT), G218 (GGT>GGG), V224 (GTT>GTC), S225 (TCA>TCG), A233 (GCA>GCG), G242 (GGT>GGC), V261 (GTT>GTC), K263 (AAA>AAG), F276 (TTC>TTT), S295 (TCA>TCT), L304 (TTG>CTG), Y306 (TAT>TAC), F311 (TTT>TTC), and V312 (GTT>GTC).

### Example 3: Preparation and Screening of Engineered Polypeptides with Improved Prenyltransferase Activity

[0165] This example illustrates preparation of a truncated polypeptide library derived from the parent polypeptide, CsdPT4, of SEQ ID NO: 20 and screening for improved activity in the conversion of OA to CBGA relative to the activity of the parent polypeptide of SEQ ID NO: 20.

[0166] Materials and Methods

[0167] A. Truncated Polynucleotide Library Build:

[0168] The polynucleotide sequence encoding a CsdPT4 polypeptide (SEQ ID NO: 20) from Cannabis sativa was codon optimized as SEQ ID NO: 19 and synthesized as a N-terminal fusion with a gene (SEQ ID NO: 525) encoding the ERG20_{WW} polypeptide (SEQ ID NO: 526). The resulting synthetic gene (SEQ ID NO: 527) encoding the complete ERG20_{WW}-CsdPT4 fusion (SEQ ID NO: 528) was expressed under the Gal1 promoter (SEQ ID NO: 529) and the CYC1 terminator sequence (SEQ ID NO: 540). This synthetic gene was integrated as a knock-in using CRISPR-Cas9 at the NDE1 site in a parent yeast strain, which already had integrated genes encoding the cannabinoid pathway enzyme activities of AAE, OLS, and OAC. The resulting strain, EVP001, integrated with the cannabinoid pathway and the ERG20_{WW}-CsdPT4 gene was used as a control strain in screening the truncation library strains for fold-improvement in CBGA titer as described below. A further screening strain was built by integrating the m-Venus cassette as a N-terminal fusion with the ERG20_{WW}, encoding the ERG20_{WW}-m-Venus polypeptide at the Nde1 site expressed under the Gal1 promoter (SEQ ID NO: 529) and the CYC1 terminator sequence (SEQ ID NO: 530), thereby replacing the previously integrated CsdPT4 gene (SEQ ID NO: 19). This resulting EVP000 strain was no longer capable of converting OA to CBGA.

[0169] Genomic DNA from a strain with the ERG20_{WW}-CsdPT4 fusion integrated at NDE1 site (EVP001), was used as the template to generate a library of thirty truncated polynucleotides relative to SEQ ID NO: 20. The truncations were designed to consecutively remove two amino acids at the N-terminal portion of the polypeptide: (1) a first PCR product (Fragment A), amplified 587 base pairs upstream of CsdPT4; (2) a second PCR product (Fragment B), amplified the CsdPT4 coding sequence while consecutively removing six base pairs relative to the N-terminus position, together with 270 base pairs downstream of CsdPT4 (CYC terminator). Fragment B was amplified with a series of 30 forward primer sequences of SEQ ID NO: 726-755 that consecutively removed six nucleotides at the N-terminal position of CsdPT4 and a single reverse primer of SEQ ID NO: 756. Fragment A was amplified using a single forward primer of SEQ ID NO: 757, and a single reverse primer of SEQ ID NO: 758. The two fragments A and B were assembled by overlap extension PCR using a forward primer of SEQ ID NO: 759 and reverse primer of SEQ ID NO: 760. The assembled PCR products were then pooled together, and gel purified to provide a truncated polynucleotide library in the form of linear donor DNA.

[0170] The pooled truncated polynucleotide library in the form of linear donor DNA was transformed in a yeast strain (EVP000), which, like EVP001, already had integrated genes encoding the cannabinoid pathway enzyme activities of AAE, OLS, and OAC. The library of linear donor DNA was integrated into EVP000 as a knock-in using CRISPR-Cas9 to replace an m-Venus cassette having an ORF of SEQ ID NO: 531 located at the NDE1 site under control the Gal1 promoter and CYC1 terminator.

[0171] B. Screening of the Polynucleotide Truncated Library for Cannabinoid Biosynthesis:

[0172] Individual clones from the polynucleotide truncated library integrated into EVP000 and the EVP001 control strain were picked and grown in 0.3 mL YPD in 96-well plates. The culture plates were incubated in shaking incubators for 48 h at 30 C, 85% humidity, and 250 rpm. Cultures were then sub-cultured into 0.27 mL fresh YPD and fed with hexanoic acid (HA) to 2 mM final concentration. Subculture plates were grown in shaking incubators for 48 hours at 30 C, 85% humidity, and 250 rpm. The whole broth from these sub-culture plates was extracted and analyzed for the presence of the cannabinoid precursor compound, OA, and the cannabinoid product, CBGA, using HPLC, as described below.

[0173] 1. HPLC sample preparation: The whole broth of the culture was extracted and diluted with MeOH for sample preparation. The prepared samples were loaded onto RapidFire365 coupled with a triple quadruple mass spectrometry detector. Metabolites OA and CBGA were detected using MRM mode. Calibration curves of OA and CBGA were generated by running serial dilutions of standards, and then used to calculate concentrations of each metabolite.

[0174] 2. HPLC instrumentation and parameters: HPLC system: Agilent RapidFire 365; Column: Agilent Cartridge C18 (12 μl, type C); Mobile phase: Pump 1 uses 95:5 H2O:acetonitrile with 0.1% formic acid at 1 mL/min; Pump 2 uses 20:80 acetonitrile:H₂O at 0.8 mL/min; Pump 3 uses MeOH with 0.1% formic acid at 0.8 mL/min; Aqueous wash uses H₂O; Organic wash uses acetonitrile; RapidFire cycle time: Aspiration 600 ms; Load/wash 3000 ms; Extra wash 2000 ms; Elute 4000 ms; Re-equilibration 500 ms.

[0175] C. Sequencing

[0176] Those clones from the polynucleotide truncated library determined by screening to exhibit an increased CBGA titer were re-tested and sequenced using Sanger sequencing technology to determine the specific truncation differences.

[0177] D. Results

[0178] Screening of the polynucleotide truncated library strains for fold-improvement in production of CBGA titer from HA feeding (FIOPC), relative to the control strain, EVP001, which expresses the parent CsdPT4 polypeptide of SEQ ID NO: 20, are summarized in Table 10 (below).

TABLE 10

| NT SEQ | AA SEQ | AA | NT | |
|---|---|---|---|---|
| ID NO: | ID NO: | difference | difference | FIOPC |
| 515 | 516 | −12 | −36 | 1.343 |
| 517 | 518 | −10 | −30 | 1.365 |
| 519 | 520 | −8 | −24 | 1.457 |
| 521 | 522 | −4 | −12 | 1.342 |
| 523 | 524 | −2 | −6 | 1.306 |

### Example 4: Preparation and Screening of Engineered Polypeptides with Improved Prenyltransferase Activity

[0179] This example illustrates preparation of strains where the synthetic gene (SEQ ID NO: 527) encoding the complete ERG20_{WW}-CsdPT4 fusion (SEQ ID NO: 528) was expressed under the Gal1 promoter (SEQ ID NO: 529) and the CYC1 terminator sequence (SEQ ID NO: 530) at various loci.

[0180] Materials and Methods

[0181] A. Donor Builds for Integration of ERG20_{WW}-CsdPT4 Fusion (SEQ ID NO: 528) at Various Loci:

[0182] The polynucleotide sequence encoding a CsdPT4 polypeptide (SEQ ID NO: 20) from Cannabis sativa was codon optimized as SEQ ID NO: 19 and synthesized as a N-terminal fusion with a gene (SEQ ID NO: 525) encoding the ERG20_{WW} polypeptide (SEQ ID NO: 526). The resulting synthetic gene (SEQ ID NO: 527) encoding the complete ERG20_{WW}-CsdPT4 fusion (SEQ ID NO: 528) was expressed under the Gal1 promoter (SEQ ID NO: 529) and the CYC1 terminator sequence (SEQ ID NO: 530). This synthetic gene was integrated as a knock-in using CRISPR-Cas9 at various sites in a parent yeast strain, which did not have any other integrated cannabinoid pathway genes. Therefore, the resulting strains were fed with olivetolic acid substrate (OA), to screen the strains for relative CBGA titer.

[0183] Homology arms were added to the 5′ and 3′ ends of the synthetic gene (SEQ ID NO: 527) encoding the complete ERG20_{WW}-CsdPT4 fusion (SEQ ID NO: 528) was expressed under the Gal1 promoter (SEQ ID NO: 529) and the CYC1 terminator sequence (SEQ ID NO: 530) via PCR. The following loci were investigated for optimal expression of the complete ERG20_{WW}-CsdPT4 fusion (SEQ ID NO: 528) as single integrations or in some cases, as double integrations; ΔNDE1, XII-5 & ΔNDE1, ΔROQ1& ΔNDE1, XII-5, ΔGal80, ΔROQ1. In some examples the integration of the complete ERG20_{WW}-CsdPT4 fusion (SEQ ID NO: 528) resulted in a knockout of the native gene at that locus (NDE1, ROQ1, Gal80).

[0184] The individual linear DNA donors with various 5′ and 3′ homology sequences were transformed in a yeast strain which contained a copy of truncated HMG1 gene integrated at the XII-2 locus and a copy of the mutant ERG20_{WW} gene (SEQ ID NO: 526) integrated at the gal80 locus, resulting in a gal80 knockout (MV021). This base screening strain, MV021, was used as the control to determine level of production of CBGA titer from OA feeding (FIOPC).

[0185] B. Screening of the ERG20_{WW}-CsdPT4 fusion (SEQ ID NO: 528) at various loci for evaluation of cannabinoid biosynthesis:

[0186] Individual clones from the linear DNA donors integrated at various loci were picked and grown in 0.3 mL YPD in 96-well plates along with the control MV021. The culture plates were incubated in shaking incubators for 48 h at 30 C, 85% humidity, and 250 rpm. Cultures were then sub-cultured into 0.27 mL fresh YPD and fed with hexanoic acid (OA) to 3 mM final concentration. Subculture plates were grown in shaking incubators for 48 hours at 30 C, 85% humidity, and 250 rpm. The whole broth from these sub-culture plates was extracted and analyzed for the presence of the cannabinoid precursor compound, OA, and the cannabinoid product, CBGA, using HPLC, as described below.

[0187] 1. HPLC sample preparation: The whole broth of the culture was extracted and diluted with MeOH for sample preparation. The prepared samples were loaded onto RapidFire365 coupled with a triple quadruple mass spectrometry detector. Metabolites OA and CBGA were detected using MRM mode. Calibration curves of OA and CBGA were generated by running serial dilutions of standards, and then used to calculate concentrations of each metabolite.

[0188] 2. HPLC instrumentation and parameters: HPLC system: Agilent RapidFire 365; Column: Agilent Cartridge C18 (12 μl, type C); Mobile phase: Pump 1 uses 95:5 H2O:acetonitrile with 0.1% formic acid at 1 mL/min; Pump 2 uses 20:80 acetonitrile:H₂O at 0.8 mL/min; Pump 3 uses MeOH with 0.1% formic acid at 0.8 mL/min; Aqueous wash uses H₂O; Organic wash uses acetonitrile; RapidFire cycle time: Aspiration 600 ms; Load/wash 3000 ms; Extra wash 2000 ms; Elute 4000 ms; Re-equilibration 500 ms.

[0189] C. Sequencing

[0190] Those clones from the various loci integration builds determined by screening to exhibit a CBGA titer higher than the control, were re-tested and sequenced using Sanger sequencing technology to confirm presence of the ERG20_{WW}-CsdPT4 fusion (SEQ ID NO: 528) at the correct loci.

[0191] D. Results

[0192] Screening of the various strains with ERG20_{WW}-CsdPT4 fusion (SEQ ID NO: 528) integrated at various loci, for evaluation of level of production of CBGA titer from OA feeding (FIOPC), relative to the control strain, MV021, which does not express a prenyl transferase gene are summarized in Table 11 (below).

TABLE 11

| | Genome locus for | Mean CBGA | Std dev. CBGA |
|---|---|---|---|
| Strain | ERG20ww:CsdPT4 | titer (mg/L) | titer |
| MV326 | ΔNDE1 | 875.6 | 82 |
| MV327 | XII-5, ΔNDE1 | 807.5 | 20 |
| MV023 | ΔROQ1, ΔNDE1 | 288.0 | 41 |
| MV020 | XII-5 | 254.5 | 37 |
| MV331 | ΔGal80 | 264.7 | 46 |
| MV022 | ΔROQ1 | 48.3 | 1 |
| MV021 | No PT | 0.0 | 0 |

[0193] While the foregoing disclosure of the present invention has been described in some detail by way of example and illustration for purposes of clarity and understanding, this disclosure including the examples, descriptions, and embodiments described herein are for illustrative purposes, are intended to be exemplary, and should not be construed as limiting the present disclosure. It will be clear to one skilled in the art that various modifications or changes to the examples, descriptions, and embodiments described herein can be made and are to be included within the spirit and purview of this disclosure and the appended claims. Further, one of skill in the art will recognize a number of equivalent methods and procedure to those described herein. All such equivalents are to be understood to be within the scope of the present disclosure and are covered by the appended claims.

[0194] Additional embodiments of the invention are set forth in the following claims.

[0195] The disclosures of all publications, patent applications, patents, or other documents mentioned herein are expressly incorporated by reference in their entirety for all purposes to the same extent as if each such individual publication, patent, patent application or other document were individually specifically indicated to be incorporated by reference herein in its entirety for all purposes and were set forth in its entirety herein. In case of conflict, the present specification, including specified terms, will control.

The application's sequence listing, which the Patent Office published only in electronic form, follows.

SEQUENCE LISTING (760 sequences)

SEQ ID NO: 1 - DNA, 2163 bp, Cannabis sativa
  source 1..2163: mol_type = genomic DNA
atgggaaaaaattataagtcacttgacagtgtggttgctagtgatttcatagccttgggtatcacatctgaggtagcggagactcttcatgggcgtttagctgagattgtgtgtaattacggggcggccacccctcagacttggatcaatatagcaaaccacatcttatctcctgatctacccttttctctacaccaaatgctgttctatgggtgttacaaagatttcgggcccgcaccgcccgcatggataccggatccagagaaagtcaaatccaccaacttaggcgcgttgcttgaaaaaagaggcaaggaattcctgggcgtcaagtacaaggaccccatctcatctttctcccacttccaagagttctctgtacgtaatccggaggtttactggcgtaccgtccttatggatgagatgaagatatcattctccaaggacccggaatgtatactaagaagggatgacattaacaacccagggggcagtgagtggcttccgggtggataccttaatagtgcaaaaaactgtcttaacgtgaactcaaacaaaaagttaaacgatacaatgatcgtgtggcgtgatgagggcaatgatgaccttccgctaaataagttgacgcttgatcagctaagaaagcgtgtctggcttgtcggatatgccctagaggagatgggccttgagaagggatgcgcgatcgccatagatatgcctatgcatgtcgatgctgtggttatatatctggccatcgttctagcgggctatgttgttgtgagtattgccgatagcttcagtgcacccgaaatatcaacgagactgcgtttgtccaaagccaaagcaatattcacacaggatcatatcattagaggaaagaagcgtattccgctatattcaagggtggtggaggccaaaagcccgatggctatagtgataccctgttcaggcagcaacatcggagctgaattaagagatggagatatatcctgggactattttttagagagggcgaaagaatttaagaactgcgagttcaccgcaagggaacagccagtggatgcgtatacaaacatactattcagttcaggtactacgggagaaccaaaggctataccctggacgcaggcaaccccgctaaaagctgccgctgacgggtggtctcatttggatatcaggaagggtgatgttatcgtatggccaacaaatcttggatggatgatgggaccgtggcttgtgtacgctagcttgttaaatggagcttcaatcgctctatataatggttcccctcttgtcagcggttttgcgaagttcgtacaggatgccaaggtaactatgctgggagtcgttcctagcatcgtcaggagttggaaatcaactaactgtgtgtctggttacgactggtccactatcagatgttttagctccagtggtgaggcctccaacgtagatgagtacctttggcttatgggacgtgccaactataaaccggtaatagagatgtgtgggggtactgaaataggaggagcgttttcagctggcagttttcttcaggctcaaagcttgtctagtttctcttcacagtgtatgggctgtacgttatacattcttgataagaacggttatccaatgcccaaaaacaaaccaggtataggagaattggcgctgggtccagtcatgtttggcgctagtaaaactctactgaacggaaatcatcacgacgtttactttaaaggtatgcctactcttaatggagaagtacttaggcgtcatggcgatatctttgagttgacatccaatggctactatcacgcccatggcagggcggatgacaccatgaacatcggggggatcaaaatctccagtatagagatcgagagagtgtgtaacgaggtagacgaccgtgtattcgagacaacagccattggggttccacccctaggtggtggccccgaacaacttgttatcttttttgtgctgaaggactcaaatgacactaccattgatttaaatcaactacgtttgtcattcaatctgggattacaaaagaagttgaatcctttattcaaggtcacaagagtagtaccccttagttccctgccaagaactgcgacaaacaagataatgcgtagagtgctaaggcagcagtttagtcattttgagtaa

SEQ ID NO: 2 - protein, 720 aa, Cannabis sativa
MGKNYKSLDSVVASDFIALGITSEVAETLHGRLAEIVCNYGAATPQTWINIANHILSPDLPFSLHQMLFYGCYKDFGPAPPAWIPDPEKVKSTNLGALLEKRGKEFLGVKYKDPISSFSHFQEFSVRNPEVYWRTVLMDEMKISFSKDPECILRRDDINNPGGSEWLPGGYLNSAKNCLNVNSNKKLNDTMIVWRDEGNDDLPLNKLTLDQLRKRVWLVGYALEEMGLEKGCAIAIDMPMHVDAVVIYLAIVLAGYVVVSIADSFSAPEISTRLRLSKAKAIFTQDHIIRGKKRIPLYSRVVEAKSPMAIVIPCSGSNIGAELRDGDISWDYFLERAKEFKNCEFTAREQPVDAYTNILFSSGTTGEPKAIPWTQATPLKAAADGWSHLDIRKGDVIVWPTNLGWMMGPWLVYASLLNGASIALYNGSPLVSGFAKFVQDAKVTMLGVVPSIVRSWKSTNCVSGYDWSTIRCFSSSGEASNVDEYLWLMGRANYKPVIEMCGGTEIGGAFSAGSFLQAQSLSSFSSQCMGCTLYILDKNGYPMPKNKPGIGELALGPVMFGASKTLLNGNHHDVYFKGMPTLNGEVLRRHGDIFELTSNGYYHAHGRADDTMNIGGIKISSIEIERVCNEVDDRVFETTAIGVPPLGGGPEQLVIFFVLKDSNDTTIDLNQLRLSFNLGLQKKLNPLFKVTRVVPLSSLPRTATNKIMRRVLRQQFSHFE

SEQ ID NO: 3 - DNA, 1158 bp, Cannabis sativa
  source 1..1158: mol_type = genomic DNA
atgaaccacttgagagcagaagggccggccagtgtactggctatagggacagccaaccccgaaaatatactgttgcaagatgagttcccagattattactttagagtgactaaatccgagcacatgacgcaacttaaggagaaattcaggaaaatatgcgacaaatctatgattagaaaaagaaattgtttcttaaatgaggagcatctaaagcagaatccccgtctggtagaacatgaaatgcaaactttggacgcgcgtcaagacatgctagttgtcgaagtgcctaaattaggcaaagacgcgtgtgcaaaggctataaaagagtggggccaaccgaagtccaaaattacacacctaatattcacttctgcgtccaccaccgacatgcccggagccgactaccactgtgcgaaacttctaggcctatccccttcagtcaagcgtgtaatgatgtatcaactggggtgctacggaggaggcaccgttttgaggattgcaaaggatatcgctgaaaataacaagggggctcgtgtacttgctgtgtgctgtgatatcatggcctgccttttcagaggcccctcagagtcagatcttgaactgttagtaggtcaggctatcttcggagatggcgctgcagccgtcatagttggggcggagcctgacgaatcagttggggagaggcccattttcgagctggtcagtacgggacagaccatcttgccaaatagcgagggcacgatcggaggccacataagggaggcgggtttgatatttgaccttcataaggatgtaccgatgttgatctccaataatattgagaagtgtcttattgaagcatttacccctattggtatttcagactggaacagtatcttctggattacgcatccgggaggtaaggcgattcttgataaagtcgaagaaaagctacacctgaagtcagacaagttcgttgactccagacacgttctttcagagcacggcaacatgagttcttccaccgtccttttcgtaatggacgagctgaggaaacgtagccttgaggaaggtaaaagtacgacaggagatgggtttgagtggggagtgttgtttggcttcggcccagggttaacagttgaacgtgtagtcgttagatctgtccctattaaatactaa

SEQ ID NO: 4 - protein, 385 aa, Cannabis sativa
MNHLRAEGPASVLAIGTANPENILLQDEFPDYYFRVTKSEHMTQLKEKFRKICDKSMIRKRNCFLNEEHLKQNPRLVEHEMQTLDARQDMLVVEVPKLGKDACAKAIKEWGQPKSKITHLIFTSASTTDMPGADYHCAKLLGLSPSVKRVMMYQLGCYGGGTVLRIAKDIAENNKGARVLAVCCDIMACLFRGPSESDLELLVGQAIFGDGAAAVIVGAEPDESVGERPIFELVSTGQTILPNSEGTIGGHIREAGLIFDLHKDVPMLISNNIEKCLIEAFTPIGISDWNSIFWITHPGGKAILDKVEEKLHLKSDKFVDSRHVLSEHGNMSSSTVLFVMDELRKRSLEEGKSTTGDGFEWGVLFGFGPGLTVERVVVRSVPIKY

SEQ ID NO: 5 - DNA, 306 bp, Cannabis sativa
  source 1..306: mol_type = genomic DNA
atggctgtcaagcaccttatcgtactgaaattcaaggacgaaattacagaagcccagaaagaagaatttttcaagacctatgtaaacctggtgaatatcatccctgcgatgaaagatgtttattggggcaaagacgtcacccaaaaaaacaaagaagaaggttacactcacatcgtcgaagtcactttcgagtcagtagagacgatccaagattacataatacacccggcccatgtgggattcggagacgtttaccgtagcttctgggaaaaacttttgattttcgactataccccgagaaaataa

SEQ ID NO: 6 - protein, 101 aa, Cannabis sativa
MAVKHLIVLKFKDEITEAQKEEFFKTYVNLVNIIPAMKDVYWGKDVTQKNKEEGYTHIVEVTFESVETIQDYIIHPAHVGFGDVYRSFWEKLLIFDYTPRK

SEQ ID NO: 7 - DNA, 1517 bp, Cannabis sativa
  source 1..1517: mol_type = genomic DNA
atcaataataatcttcatgggactctcattagtttgtaccttttcatttcaaactaattatcatactttattaaaccctcataataagaatcccaaaaactcattattatcttatcaacaccccaaaacaccaataattaaatcctcttatgataattttccctctaaatattgcttaaccaagaactttcatttacttggactcaattcacacaacagaataagctcacaatcaaggtccattagggcaggtagcgatcaaattgaaggttctcctcatcatgaatctgataattcaatagcaactaaaattttaaattttggacatacttgttggaaacttcaaagaccatatgtagtaaaagggatgatttcaatcgcttgtggtttgtttgggagagagttgttcaataacagacatttattcagttggggtttgatgtggaaggcattctttgctttggtgcctatattgtccttcaatttctttgcagcaatcatgaatcaaatttacgatgtggacatcgacaggataaacaagcctgatctaccactagtttcaggggaaatgtcaattgaaacagcttggattttgagcataattgtggcactaactgggttgatagtaactataaaattgaaatctgcaccactttttgttttcatttacatttttggtatatttgctgggtttgcctattctgttccaccaattagatggaagcaatatccttttaccaattttctaattaccatatcgagtcatgtgggcttagctttcacatcatattctgcaaccacatcagctcttggtttaccatttgtgtggaggcctgcttttagtttcatcatagcattcatgacagttatgggtatgactattgcttttgccaaagatatttcagatattgaaggcgacgccaaatatggggtatcaactgttgcaaccaaattaggtgctaggaacatgacatttgttgtttctggagttcttcttctaaactacttggtttctatatctattgggataatttggcctcaggttttcaagagtaacataatgatactttctcatgcaatcttagcattttgcttaatcttccagactcgtgagcttgctctagcaaattacgcctcggcgccaagcagacaattcttcgagtttatctggttgctatattatgctgaatactttgtatatgtatttatataagaccataatataacatatatatgtttattacataaaattgggacacaaaaacgtcaattatttggacaaaagtactcagaaagacctctttcactacaaggggaggccatttagttatacttgggtttcaatcaacaaatttataaatttttaagattttatttacaaaacattttcatgtgtaattaaatcgatcgtcatttattttttggatacaacttggttcaacttattttaattagagtgcttcgtaatttaactacaattatagaagggcattttataaaaatactggatttggggt

SEQ ID NO: 8 - protein, 398 aa, Cannabis sativa
MGLSLVCTFSFQTNYHTLLNPHNKNPKNSLLSYQHPKTPIIKSSYDNFPSKYCLTKNFHLLGLNSHNRISSQSRSIRAGSDQIEGSPHHESDNSIATKILNFGHTCWKLQRPYVVKGMISIACGLFGRELFNNRHLFSWGLMWKAFFALVPILSFNFFAAIMNQIYDVDIDRINKPDLPLVSGEMSIETAWILSIIVALTGLIVTIKLKSAPLFVFIYIFGIFAGFAYSVPPIRWKQYPFTNFLITISSHVGLAFTSYSATTSALGLPFVWRPAFSFIIAFMTVMGMTIAFAKDISDIEGDAKYGVSTVATKLGARNMTFVVSGVLLLNYLVSISIGIIWPQVFKSNIMILSHAILAFCLIFQTRELALANYASAPSRQFFEFIWLLYYAEYFVYVFI

SEQ ID NO: 9 - DNA, 954 bp, synthetic construct
  source 1..954: mol_type = other DNA
atgatcgaaggttcacctcatcatgaaagtgataacagcatagccacgaagattttgaatttcggccatacttgttggaagctacagaggccgtacgtcgttaaggggatgatttccattgcgtgcggtctgtttggcagggaattatttaacaacagacacttattcagttggggcctgatgtggaaggccttcttcgctcttgtacccattctgtccttcaacttttttgcagcgatcatgaatcaaatatacgatgtagacatcgatagaataaacaagcccgatttacctctggtatcaggcgaaatgagcatcgaaactgcgtggattttatcaatcatcgttgcattgactgggctgatagtgaccataaagttaaagtcagccccgttgtttgtcttcatatacatcttcggcattttcgcgggctttgcgtatagtgtacctcccattagatggaagcagtacccgtttactaactttcttattacaattagcagccatgtcggtcttgcattcacgtcctactcagccaccacatccgcactggggctaccgtttgtgtggcgtccagccttcagcttcatcatcgcattcatgacagtaatgggtatgacgatagcttttgcaaaggatataagtgatatcgagggtgacgctaagtatggagtgtctactgtggccacgaagctgggggcccgtaatatgactttcgtggtatcaggtgtactattgcttaattaccttgtttctatatcaatcggaattatttggccacaagttttcaaatccaatataatgatcctatcacacgctattttagcgttttgtttgatatttcagactagagagcttgcactagcgaattacgcgagtgccccgagtaggcagtttttcgagttcatatggctattatactatgctgagtactttgtttacgtatttatttaa

SEQ ID NO: 10 - protein, 317 aa, synthetic construct
MIEGSPHHESDNSIATKILNFGHTCWKLQRPYVVKGMISIACGLFGRELFNNRHLFSWGLMWKAFFALVPILSFNFFAAIMNQIYDVDIDRINKPDLPLVSGEMSIETAWILSIIVALTGLIVTIKLKSAPLFVFIYIFGIFAGFAYSVPPIRWKQYPFTNFLITISSHVGLAFTSYSATTSALGLPFVWRPAFSFIIAFMTVMGMTIAFAKDISDIEGDAKYGVSTVATKLGARNMTFVVSGVLLLNYLVSISIGIIWPQVFKSNIMILSHAILAFCLIFQTRELALANYASAPSRQFFEFIWLLYYAEYFVYVFI

SEQ ID NO: 11 - DNA, 1635 bp, Cannabis sativa
  source 1..1635: mol_type = genomic DNA
atgaagtgctcaacattctccttttggtttgtttgcaagataatatttttctttttctcattcaatatccaaacttccattgctaatcctcgagaaaacttccttaaatgcttctcgcaatatattcccaataatgcaacaaatctaaaactcgtatacactcaaaacaacccattgtatatgtctgtcctaaattcgacaatacacaatcttagattcacctctgacacaaccccaaaaccacttgttatcgtcactccttcacatgtctctcatatccaaggcactattctatgctccaagaaagttggcttgcagattcgaactcgaagtggtggtcatgattctgagggcatgtcctacatatctcaagtcccatttgttatagtagacttgagaaacatgcgttcaatcaaaatagatgttcatagccaaactgcatgggttgaagccggagctacccttggagaagtttattattgggttaatgagaaaaatgagaatcttagtttggcggctgggtattgccctactgtttgcgcaggtggacactttggtggaggaggctatggaccattgatgagaaactatggcctcgcggctgataatatcattgatgcacacttagtcaacgttcatggaaaagtgctagatcgaaaatctatgggggaagatctcttttgggctttacgtggtggtggagcagaaagcttcggaatcattgtagcatggaaaattagactggttgctgtcccaaagtctactatgtttagtgttaaaaagatcatggagatacatgagcttgtcaagttagttaacaaatggcaaaatattgcttacaagtatgacaaagatttattactcatgactcacttcataactaggaacattacagataatcaagggaagaataagacagcaatacacacttacttctcttcagttttccttggtggagtggatagtctagtcgacttgatgaacaagagttttcctgagttgggtattaaaaaaacggattgcagacaattgagctggattgatactatcatcttctatagtggtgttgtaaattacgacactgataattttaacaaggaaattttgcttgatagatccgctgggcagaacggtgctttcaagattaagttagactacgttaagaaaccaattccagaatctgtatttgtccaaattttggaaaaattatatgaagaagatataggagctgggatgtatgcgttgtacccttacggtggtataatggatgagatttcagaatcagcaattccattccctcatcgagctggaatcttgtatgagttatggtacatatgtagttgggagaagcaagaagataacgaaaagcatctaaactggattagaaatatttataacttcatgactccttatgtgtccaaaaatccaagattggcatatctcaattatagagaccttgatataggaataaatgatcccaagaatccaaataattacacacaagcacgtatttggggtgagaagtattttggtaaaaattttgacaggctagtaaaagtgaaaaccctggttgatcccaataacttttttagaaacgaacaaagcatcccacctcttccacggcatcgtcattaa

SEQ ID NO: 12 - protein, 544 aa, Cannabis sativa
MKCSTFSFWFVCKIIFFFFSFNIQTSIANPRENFLKCFSQYIPNNATNLKLVYTQNNPLYMSVLNSTIHNLRFTSDTTPKPLVIVTPSHVSHIQGTILCSKKVGLQIRTRSGGHDSEGMSYISQVPFVIVDLRNMRSIKIDVHSQTAWVEAGATLGEVYYWVNEKNENLSLAAGYCPTVCAGGHFGGGGYGPLMRNYGLAADNIIDAHLVNVHGKVLDRKSMGEDLFWALRGGGAESFGIIVAWKIRLVAVPKSTMFSVKKIMEIHELVKLVNKWQNIAYKYDKDLLLMTHFITRNITDNQGKNKTAIHTYFSSVFLGGVDSLVDLMNKSFPELGIKKTDCRQLSWIDTIIFYSGVVNYDTDNFNKEILLDRSAGQNGAFKIKLDYVKKPIPESVFVQILEKLYEEDIGAGMYALYPYGGIMDEISESAIPFPHRAGILYELWYICSWEKQEDNEKHLNWIRNIYNFMTPYVSKNPRLAYLNYRDLDIGINDPKNPNNYTQARIWGEKYFGKNFDRLVKVKTLVDPNNFFRNEQSIPPLPRHRH

SEQ ID NO: 13 - DNA, 1554 bp, Cannabis sativa
  source 1..1554: mol_type = genomic DNA
atgaacccccgtgaaaattttttgaaatgtttctctcaatacatacccaacaatgcaaccaacttaaagctggtatatactcaaaacaaccccctatatatgtctgttctaaatagtactatccataacttacgtttcacctcagataccacccctaaaccgctggtcatcgtgactccgtctcatgtttcacacatacagggcacgatattgtgctcaaaaaaggtcgggttacagattcgtacccgttcaggaggtcatgatagtgagggaatgtcttacatctcccaggtcccttttgtaattgtcgaccttcgtaatatgagatccataaagatcgacgttcattcacagacggcgtgggtagaggctggtgcaaccctaggtgaagtctactactgggtcaacgaaaaaaacgagaacttatcattagctgcggggtattgccctacagtttgtgccggaggtcattttggaggtggaggctacgggccactgatgaggaactacggtctggcagcagacaacattatagatgcacacctagtgaacgtgcatggtaaagttttagatagaaagtccatgggagaagatttgttttgggcactacgtggaggaggggctgagtcattcgggattattgtagcgtggaagatccgtctggtcgcagtccctaaatctacgatgttttccgtgaaaaagattatggaaattcacgagctagtgaaacttgtcaataagtggcagaatatagcatacaaatatgacaaggatctattgttgatgacgcatttcatcacaagaaacattacggacaatcaaggtaagaataagacggctattcacacttacttcagctccgtttttctaggaggggtagattccctagttgacctgatgaataagagttttcccgagttgggtattaaaaaaactgattgtagacagctgtcttggatcgacacaatcatattctactctggtgtggtaaactatgacaccgataatttcaacaaagaaatcttactggatagatcagccggtcaaaacggcgcgtttaaaatcaagctggattacgtaaagaagcctatacccgaatccgtatttgtacagattctggaaaagttatacgaggaagacattggggcgggtatgtacgctctttacccttacggcgggatcatggatgagatttccgaaagtgctatcccgttccctcatcgtgctggcattctgtacgagttatggtatatttgcagttgggagaagcaggaggataatgaaaagcacctaaattggattcgtaatatttataatttcatgactccctatgttagtaagaaccccagactggcctaccttaattatagagacctggacatcgggataaatgatccgaagaacccaaataactatacgcaggccaggatttggggggaaaagtatttcggaaagaactttgacagactggtgaaagttaagaccctggtggatccaaataattttttcaggaacgagcagagtattcccccgcttccacgtcacaggcattaa

SEQ ID NO: 14 - protein, 517 aa, Cannabis sativa
MNPRENFLKCFSQYIPNNATNLKLVYTQNNPLYMSVLNSTIHNLRFTSDTTPKPLVIVTPSHVSHIQGTILCSKKVGLQIRTRSGGHDSEGMSYISQVPFVIVDLRNMRSIKIDVHSQTAWVEAGATLGEVYYWVNEKNENLSLAAGYCPTVCAGGHFGGGGYGPLMRNYGLAADNIIDAHLVNVHGKVLDRKSMGEDLFWALRGGGAESFGIIVAWKIRLVAVPKSTMFSVKKIMEIHELVKLVNKWQNIAYKYDKDLLLMTHFITRNITDNQGKNKTAIHTYFSSVFLGGVDSLVDLMNKSFPELGIKKTDCRQLSWIDTIIFYSGVVNYDTDNFNKEILLDRSAGQNGAFKIKLDYVKKPIPESVFVQILEKLYEEDIGAGMYALYPYGGIMDEISESAIPFPHRAGILYELWYICSWEKQEDNEKHLNWIRNIYNFMTPYVSKNPRLAYLNYRDLDIGINDPKNPNNYTQARIWGEKYFGKNFDRLVKVKTLVDPNNFFRNEQSIPPLPRHRH

SEQ ID NO: 15 - DNA, 1638 bp, Cannabis sativa
  source 1..1638: mol_type = genomic DNA
atgaattgctcagcattttccttttggtttgtttgcaaaataatatttttctttctctcattccatatccaaatttcaatagctaatcctcgagaaaacttccttaaatgcttctcaaaacatattcccaacaatgtagcaaatccaaaactcgtatacactcaacacgaccaattgtatatgtctatcctgaattcgacaatacaaaatcttagattcatctctgatacaaccccaaaaccactcgttattgtcactccttcaaataactcccatatccaagcaactattttatgctctaagaaagttggcttgcagattcgaactcgaagcggtggccatgatgctgagggtatgtcctacatatctcaagtcccatttgttgtagtagacttgagaaacatgcattcgatcaaaatagatgttcatagccaaactgcgtgggttgaagccggagctacccttggagaagtttattattggatcaatgagaagaatgagaatcttagttttcctggtgggtattgccctactgttggcgtaggtggacactttagtggaggaggctatggagcattgatgcgaaattatggccttgcggctgataatattattgatgcacacttagtcaatgttgatggaaaagttctagatcgaaaatccatgggagaagatctgttttgggctatacgtggtggtggaggagaaaactttggaatcattgcagcatggaaaatcaaactggttgctgtcccatcaaagtctactatattcagtgttaaaaagaacatggagatacatgggcttgtcaagttatttaacaaatggcaaaatattgcttacaagtatgacaaagatttagtactcatgactcacttcataacaaagaatattacagataatcatgggaagaataagactacagtacatggttacttctcttcaatttttcatggtggagtggatagtctagtcgacttgatgaacaagagctttcctgagttgggtattaaaaaaactgattgcaaagaatttagctggattgatacaaccatcttctacagtggtgttgtaaattttaacactgctaattttaaaaaggaaattttgcttgatagatcagctgggaagaagacggctttctcaattaagttagactatgttaagaaaccaattccagaaactgcaatggtcaaaattttggaaaaattatatgaagaagatgtaggagctgggatgtatgtgttgtacccttacggtggtataatggaggagatttcagaatcagcaattccattccctcatcgagctggaataatgtatgaactttggtacactgcttcctgggagaagcaagaagataatgaaaagcatataaactgggttcgaagtgtttataattttacgactccttatgtgtcccaaaatccaagattggcgtatctcaattatagggaccttgatttaggaaaaactaatcatgcgagtcctaataattacacacaagcacgtatttggggtgaaaagtattttggtaaaaattttaacaggttagttaaggtgaaaactaaagttgatcccaataatttttttagaaacgaacaaagtatcccacctcttccaccgcatcatcattaa

SEQ ID NO: 16 - protein, 545 aa, Cannabis sativa
MNCSAFSFWFVCKIIFFFLSFHIQISIANPRENFLKCFSKHIPNNVANPKLVYTQHDQLYMSILNSTIQNLRFISDTTPKPLVIVTPSNNSHIQATILCSKKVGLQIRTRSGGHDAEGMSYISQVPFVVVDLRNMHSIKIDVHSQTAWVEAGATLGEVYYWINEKNENLSFPGGYCPTVGVGGHFSGGGYGALMRNYGLAADNIIDAHLVNVDGKVLDRKSMGEDLFWAIRGGGGENFGIIAAWKIKLVAVPSKSTIFSVKKNMEIHGLVKLFNKWQNIAYKYDKDLVLMTHFITKNITDNHGKNKTTVHGYFSSIFHGGVDSLVDLMNKSFPELGIKKTDCKEFSWIDTTIFYSGVVNFNTANFKKEILLDRSAGKKTAFSIKLDYVKKPIPETAMVKILEKLYEEDVGAGMYVLYPYGGIMEEISESAIPFPHRAGIMYELWYTASWEKQEDNEKHINWVRSVYNFTTPYVSQNPRLAYLNYRDLDLGKTNHASPNNYTQARIWGEKYFGKNFNRLVKVKTKVDPNNFFRNEQSIPPLPPHHH

SEQ ID NO: 17 - DNA, 1557 bp, Cannabis sativa
  source 1..1557: mol_type = genomic DNA
atgaatcctcgagaaaacttccttaaatgcttctcaaaacatattcccaacaatgtagcaaatccaaaactcgtatacactcaacacgaccaattgtatatgtctatcctgaattcgacaatacaaaatcttagattcatctctgatacaaccccaaaaccactcgttattgtcactccttcaaataactcccatatccaagcaactattttatgctctaagaaagttggcttgcagattcgaactcgaagcggtggccatgatgctgagggtatgtcctacatatctcaagtcccatttgttgtagtagacttgagaaacatgcattcgatcaaaatagatgttcatagccaaactgcgtgggttgaagccggagctacccttggagaagtttattattggatcaatgagaagaatgagaatcttagttttcctggtgggtattgccctactgttggcgtaggtggacactttagtggaggaggctatggagcattgatgcgaaattatggccttgcggctgataatattattgatgcacacttagtcaatgttgatggaaaagttctagatcgaaaatccatgggagaagatctgttttgggctatacgtggtggtggaggagaaaactttggaatcattgcagcatggaaaatcaaactggttgctgtcccatcaaagtctactatattcagtgttaaaaagaacatggagatacatgggcttgtcaagttatttaacaaatggcaaaatattgcttacaagtatgacaaagatttagtactcatgactcacttcataacaaagaatattacagataatcatgggaagaataagactacagtacatggttacttctcttcaatttttcatggtggagtggatagtctagtcgacttgatgaacaagagctttcctgagttgggtattaaaaaaactgattgcaaagaatttagctggattgatacaaccatcttctacagtggtgttgtaaattttaacactgctaattttaaaaaggaaattttgcttgatagatcagctgggaagaagacggctttctcaattaagttagactatgttaagaaaccaattccagaaactgcaatggtcaaaattttggaaaaattatatgaagaagatgtaggagctgggatgtatgtgttgtacccttacggtggtataatggaggagatttcagaatcagcaattccattccctcatcgagctggaataatgtatgaactttggtacactgcttcctgggagaagcaagaagataatgaaaagcatataaactgggttcgaagtgtttataattttacgactccttatgtgtcccaaaatccaagattggcgtatctcaattatagggaccttgatttaggaaaaactaatcatgcgagtcctaataattacacacaagcacgtatttggggtgaaaagtattttggtaaaaattttaacaggttagttaaggtgaaaactaaagttgatcccaataatttttttagaaacgaacaaagtatcccacctcttccaccgcatcatcattaa

SEQ ID NO: 18 - protein, 518 aa, Cannabis sativa
MNPRENFLKCFSKHIPNNVANPKLVYTQHDQLYMSILNSTIQNLRFISDTTPKPLVIVTPSNNSHIQATILCSKKVGLQIRTRSGGHDAEGMSYISQVPFVVVDLRNMHSIKIDVHSQTAWVEAGATLGEVYYWINEKNENLSFPGGYCPTVGVGGHFSGGGYGALMRNYGLAADNIIDAHLVNVDGKVLDRKSMGEDLFWAIRGGGGENFGIIAAWKIKLVAVPSKSTIFSVKKNMEIHGLVKLFNKWQNIAYKYDKDLVLMTHFITKNITDNHGKNKTTVHGYFSSIFHGGVDSLVDLMNKSFPELGIKKTDCKEFSWIDTTIFYSGVVNFNTANFKKEILLDRSAGKKTAFSIKLDYVKKPIPETAMVKILEKLYEEDVGAGMYVLYPYGGIMEEISESAIPFPHRAGIMYELWYTASWEKQEDNEKHINWVRSVYNFTTPYVSQNPRLAYLNYRDLDLGKTNHASPNNYTQARIWGEKYFGKNFNRLVKVKTKVDPNNFFRNEQSIPPLPPHHH

SEQ ID NO: 19 - DNA, 951 bp, synthetic construct
  source 1..951: mol_type = other DNA
attgaaggttcaccacatcatgaatctgataactcaatcgcaactaaaattttgaactttggtcatacatgttggaaattgcaaagaccatacgttgttaagggtatgatttctattgcttgtggtttatttggtagagaattgtttaataacagacatttgttttcttggggtttgatgtggaaagcatttttcgcattagttccaatcttgtcttttaatttctttgctgcaatcatgaaccaaatatatgatgttgatattgatagaattaataagccagatttgccattggtttctggtgaaatgtcaatcgaaactgcttggattttatctatcatcgttgcattgactggtttgatcgttacaattaaattaaaatcagctccattgttcgtttttatatatatcttcggtatcttcgctggttttgcatactctgttccaccaattagatggaagcaatacccttttactaatttcttgatcacaatttcttcacatgttggtttggcttttacttcttactcagctactacatctgcattaggtttgccatttgtttggaggccagctttttcttttattatcgcttttatgactgttatgggtatgacaatcgctttcgcaaaggatatctctgatattgaaggtgacgctaaatacggtgtttcaactgttgctacaaaattgggtgcaagaaacatgactttcgttgtttctggtgttttgttgttgaactatttggtttctatctcaatcggtattatttggccacaagtttttaaatctaacatcatgatcttgtcacatgctatcttggcattctgtttgatcttccaaacaagagaattagctttggcaaattatgcttctgcaccatcaagacaatttttcgagtttatttggttgttgtactacgctgaatattttgtttacgtttttatttga

SEQ ID NO: 20 - protein, 316 aa, Cannabis sativa
IEGSPHHESDNSIATKILNFGHTCWKLQRPYVVKGMISIACGLFGRELFNNRHLFSWGLMWKAFFALVPILSFNFFAAIMNQIYDVDIDRINKPDLPLVSGEMSIETAWILSIIVALTGLIVTIKLKSAPLFVFIYIFGIFAGFAYSVPPIRWKQYPFTNFLITISSHVGLAFTSYSATTSALGLPFVWRPAFSFIIAFMTVMGMTIAFAKDISDIEGDAKYGVSTVATKLGARNMTFVVSGVLLLNYLVSISIGIIWPQVFKSNIMILSHAILAFCLIFQTRELALANYASAPSRQFFEFIWLLYYAEYFVYVFI

SEQ ID NO: 21 - DNA, 951 bp, synthetic construct
  source 1..951: mol_type = other DNA
attgaaggttcaccacatcatgaatctgataactcaatcgcaactaaaattttgaactttggtcatacatgttggaaattgcaaagaccatacgttgttaagggtatgatttctattgcttgtggtttatttggtagagaattgtttaataacagacatttgttttcttggggtttgatgtggaaagcatttttcgcattagttccaatcttgtcttttaatttctttgctgcaatcatgaaccaaatatatgatgttgatattgatagaattaataagccagatttgccattggtttctggtgaaatgtcaatcgaaactgcttggattttatctatcatcgttgcattgactggtttgatcgttacaattaaattaaaatcagctccattgttcgttgggatatatatcttcggtatcttcgctggttttgcatactctgttccaccaattagatggaagcaatacccttttactaatttcttgatcacaatttcttcacatgttggtttggcttttactgtgtactcagctactacatctgcattaggtttgccatttgtttggaggccagctttttcttttattatcgcttttatgactgttatgggtatgacaatcgctttcgcaaaggatatctctgatattgaaggtgacgctaaatacggtgtttcaactgttgctacaaaattgggtgcaagaaacatgactttcgttgtttctggtgttttgttgttgaactatttggtttctatctcaatcggtattatttggccacaagtttttaaatctaacatcatgatcttgtcacatgctatcttggcattctgtttgatcttccaaacaagagaattagctttggcaaattatgcttctgcaccatcaagacaatttttcgagtttatttggttgttgtactacgctgaatattttgtttacgtttttatttga

SEQ ID NO: 22 - protein, 316 aa, synthetic construct
IEGSPHHESDNSIATKILNFGHTCWKLQRPYVVKGMISIACGLFGRELFNNRHLFSWGLMWKAFFALVPILSFNFFAAIMNQIYDVDIDRINKPDLPLVSGEMSIETAWILSIIVALTGLIVTIKLKSAPLFVGIYIFGIFAGFAYSVPPIRWKQYPFTNFLITISSHVGLAFTVYSATTSALGLPFVWRPAFSFIIAFMTVMGMTIAFAKDISDIEGDAKYGVSTVATKLGARNMTFVVSGVLLLNYLVSISIGIIWPQVFKSNIMILSHAILAFCLIFQTRELALANYASAPSRQFFEFIWLLYYAEYFVYVFI

SEQ ID NO: 23 - DNA, 951 bp, synthetic construct
  source 1..951: mol_type = other DNA
attgaaggttcaccacatcatgaatctgataactcaatcgcaactaaaattttgaactttggtcatacatgttggaaattgcaaagaccatacgttgttaagggtatgatttctattgcttgtggtttatttggtagagaattgtttaataacagacatttgttttcttggggtttgatgtggaaagcatttttcgcattagttccaatcttgtcttttaatttctttgctgcatgtatgaaccaaatatatgatgttgatattgatagaattaataagccagatttgccattggtttctggtgaaatgtcaatcgaaactgcttggattttatctatcatcgttgcattgactggtttgatcgttacaattaaattaaaatcagctccattgttcgtttttatatatatcttcggtatcttcgctggttttgcatactctgttccaccaattagatggaagcaatacccttttactaatttcttgatcacaatttcttcacatgttggtttggcttttacttcttactcagctactacatctgcattaggtttgccatttgtttggaggccagctttttcttttattatcgcttttatgactgttatgggtatgacaatcgctttcgcaaaggatatctctgatattgaaggtgacgctaaatacggtgtttcaactgttgctacaaaattgggtgcaagaaacatgactttcgttgtttctggtgttttgttgttgaactatttggtttctatctcaatcggtattatttggccacaagtttttaaatctaacatcatgatcttgtcacatgctatcttggcattctgtttgatcttccaaacaagagaattagctttggcaaattatgcttctgcaccatcaagacaatttttcgagtttatttggttgttgtactacgctgaatattttgtttacgtttttatttga

SEQ ID NO: 24 - protein, 316 aa, synthetic construct
IEGSPHHESDNSIATKILNFGHTCWKLQRPYVVKGMISIACGLFGRELFNNRHLFSWGLMWKAFFALVPILSFNFFAACMNQIYDVDIDRINKPDLPLVSGEMSIETAWILSIIVALTGLIVTIKLKSAPLFVFIYIFGIFAGFAYSVPPIRWKQYPFTNFLITISSHVGLAFTSYSATTSALGLPFVWRPAFSFIIAFMTVMGMTIAFAKDISDIEGDAKYGVSTVATKLGARNMTFVVSGVLLLNYLVSISIGIIWPQVFKSNIMILSHAILAFCLIFQTRELALANYASAPSRQFFEFIWLLYYAEYFVYVFI

SEQ ID NO: 25 - DNA, 951 bp, synthetic construct
  source 1..951: mol_type = other DNA
attgaaggttcaccacatcatgaatctgataactcaatcgcaactaaaattttgaactttggtcatacatgttggaaattgcaaagaccatacgttgttaagggtatgatttctattgcttgtggtttatttggtagagaattgtttaataacagacatttgttttcttggggtttgatgtggaaagcatttttcgcattagttccaatcttgtcttttaatttctttgctgcaatcatgaaccaaatatatgatgttgatattgatagaattaataagccagatttgccattggtttctggtgaaatgtcaatccggactgcttggattttatctatcatcgttgcattgactggtttgatcgttacaattaaattaaaatcagctccattgttcgtttttatatatatcttcggtatcttcgctggttttgcatactctgttccaccaattagatggaagcaatacccttttactaatttcttgatcacaatttcttcacatgttggtttggcttttacttcttactcagctactacatctgccttaggtttgccatttgtttggaggccagctttttcttttattatcgcttttatgactgttatgggtatgacaatcgctttcgcaaaggatatctctgatattgaaggtgacgctaaatacggtgtttcaactgttgctacaaaattgggtgcaagaaacatgactttcgttgtttctggtgttttgttgttgaactatttggtttctatctcaatcggtattatttggccacaagtttttaaatctaacatcatgatcttgtcacatgctatcttggcattctgtttgatcttccaaacaagagaattagctttggcaaattatgcttctgcaccatcaagacaatttttcgagtttatttggttgttgtactacgctgaatattttgtttacgtttttatttga

SEQ ID NO: 26 - protein, 316 aa, synthetic construct
IEGSPHHESDNSIATKILNFGHTCWKLQRPYVVKGMISIACGLFGRELFNNRHLFSWGLMWKAFFALVPILSFNFFAAIMNQIYDVDIDRINKPDLPLVSGEMSIRTAWILSIIVALTGLIVTIKLKSAPLFVFIYIFGIFAGFAYSVPPIRWKQYPFTNFLITISSHVGLAFTSYSATTSALGLPFVWRPAFSFIIAFMTVMGMTIAFAKDISDIEGDAKYGVSTVATKLGARNMTFVVSGVLLLNYLVSISIGIIWPQVFKSNIMILSHAILAFCLIFQTRELALANYASAPSRQFFEFIWLLYYAEYFVYVFI

SEQ ID NO: 27 - DNA, 951 bp, synthetic construct
  source 1..951: mol_type = other DNA
attgaaggttcaccacatcatgaatctgataactcaatcgcaactaaaattttgaactttggtcatacatgttggaaattgcaaagaccatacgttgttaagggtatgatttctattgcttgtggtttatttggtagagaattgtttaataacagacatttgttttcttggggtttgatggcgaaagcatttttcgcattagttccaatcttgtcttttaatttctttgctgcaatcatgaaccaaatatatgatgttgatattgatagaattaataagccagatttgccattggtttctggtgaaatgtcaatcgaaactgcttggattttatctatcatcgttgcattgactggtttgatcgttacaattaaattaaaatcagctccattgttcgtttttatatatatcttcggtatcttcgctggttttgcatactctgttccaccaattagatggaagcaatacccttttactaatttcttgatcacaatttcttcacatgttggtttggcttttacttcttactcagctactacatctgcattaggtttgccatttgtttggaggccagctttttcttttattatcgcttttatgactgttatgggtatgacaatcgctttcgcaaaggatatctctgatattgaaggtgacgctaaatacggtgtttcaactgttgctacaaaattgggtgcaagaaacatgactttcgttgtttctggtgttttgttgttgaactatttggtttctatctcaatcggtattatttggccacaagtttttaaatctaacatcatgatcttgtcacatgctatcttggcattctgtttgatcttccaaacaagagaattagctttggcaaattatgcttctgcaccatcaagacaatttttcgagtttatttggttgttgtactacgctgaatattttgtttacgtttttatttga

SEQ ID NO: 28 - protein, 316 aa, synthetic construct
IEGSPHHESDNSIATKILNFGHTCWKLQRPYVVKGMISIACGLFGRELFNNRHLFSWGLMAKAFFALVPILSFNFFAAIMNQIYDVDIDRINKPDLPLVSGEMSIETAWILSIIVALTGLIVTIKLKSAPLFVFIYIFGIFAGFAYSVPPIRWKQYPFTNFLITISSHVGLAFTSYSATTSALGLPFVWRPAFSFIIAFMTVMGMTIAFAKDISDIEGDAKYGVSTVATKLGARNMTFVVSGVLLLNYLVSISIGIIWPQVFKSNIMILSHAILAFCLIFQTRELALANYASAPSRQFFEFIWLLYYAEYFVYVFI

SEQ ID NO: 29 - DNA, 951 bp, synthetic construct
  source 1..951: mol_type = other DNA
attgaaggttcaccacatcatgaatctgataactcaatcgcaactaaaattttgaactttggtcatacatgttggaaattgcaaagaccatacgttgttaagggtatgatttctattgcttgtggtttatttggtagagaattgtttaataacagacatttgttttcttggggtttgatgtggaaagcatttttcgcattagttccaatcttgtcttttaatttctttgctgcaatcatgaaccaaatatatgatgttgatattgatagaattaataagccagatttgccattggtttctggtgaaatgtcaatcgaaactgcttggattttatctatcatcgttgcattgactggtttgatcgttacaattaaattaaaatcagctccattgttcgtttttatatatatcttcggtatcttcgctggttttgcatactctgttccaccaattagatggaagcaatacccttttactaatttcttgatcacaatttcttcacatgttggtttggcttttactgtttactcagctactacatctgcattaggtttgccatttgtttggaggccagctttttcttttattatcgcttttatgactgttatgggtatgacaatcgctttcgcaaaggatatctctgatattgaaggtgacgctaaatacggtgtttcaactgttgctacaaaattgggtgcaagaaacatgactttcgttgtttctggtgttttgttgttgaactatttggtttctatctcaatcggtattatttggccacaagtttttaaatctaacatcatgatcttgtcacatgctatcttggcattctgtttgatcttccaaacaagagaattagctttggcaaattatgcttctgcaccatcaagacaatttttcgagtttatttggttgttgtactacgctgaatattttgtttacgtttttatttga

SEQ ID NO: 30 - protein, 316 aa, synthetic construct
IEGSPHHESDNSIATKILNFGHTCWKLQRPYVVKGMISIACGLFGRELFNNRHLFSWGLMWKAFFALVPILSFNFFAAIMNQIYDVDIDRINKPDLPLVSGEMSIETAWILSIIVALTGLIVTIKLKSAPLFVFIYIFGIFAGFAYSVPPIRWKQYPFTNFLITISSHVGLAFTVYSATTSALGLPFVWRPAFSFIIAFMTVMGMTIAFAKDISDIEGDAKYGVSTVATKLGARNMTFVVSGVLLLNYLVSISIGIIWPQVFKSNIMILSHAILAFCLIFQTRELALANYASAPSRQFFEFIWLLYYAEYFVYVFI

SEQ ID NO: 31 - DNA, 951 bp, synthetic construct
  source 1..951: mol_type = other DNA
attgaaggttcaccacatcatgaatctgataactcaatcgcaactaaaattttgaactttggtcatacatgttggaaattgcaaagaccatacgttgttaagggtatgatttctattgcttgtggtttatttggtagagaattgtttaataacagacatttgttttcttggtcgttgatgtggaaagcatttttcgcattagttccaatcttgtctttcaatttctttgctgcaatcatgaaccaaatatatgatgttgatattgatagaattaataagccagatttgccattggtttctggtgaaatgtcaatcgaaactgcttggattttatctatcatcgttgcattgactggtttgatcgttacaattaaattaaaatcagctccattgttcgtttttatatatatcttcggtatcttcgctggttttgcatactctgttccaccaattagatggaagcaatacccttttactaatttcttgatcacaatttcttcacatgttggtttggcttttacttcttactcagctactacatctgcattaggtttgccatttgtttggaggccagctttttcttttattatcgcttttatgactgttatgggtatgacaatcgctttcgcaaaggatatctctgatattgaaggtgacgctaaatacggtgtttcaactgttgctacaaaattgggtgcaagaaacatgactttcgttgtttctggtgttttgttgttgaactatttggtttctatctcaatcggtattatttggccacaagtttttaaatctaacatcatgatcttgtcacatgctatcttggcattctgtttgatcttccaaacaagagaattagctttggcaaattatgcttctgcaccatcaagacaatttttcgagtttatttggttgttgtactacgctgaatattttgtttacgtttttatttga

SEQ ID NO: 32 - protein, 316 aa, synthetic construct
IEGSPHHESDNSIATKILNFGHTCWKLQRPYVVKGMISIACGLFGRELFNNRHLFSWSLMWKAFFALVPILSFNFFAAIMNQIYDVDIDRINKPDLPLVSGEMSIETAWILSIIVALTGLIVTIKLKSAPLFVFIYIFGIFAGFAYSVPPIRWKQYPFTNFLITISSHVGLAFTSYSATTSALGLPFVWRPAFSFIIAFMTVMGMTIAFAKDISDIEGDAKYGVSTVATKLGARNMTFVVSGVLLLNYLVSISIGIIWPQVFKSNIMILSHAILAFCLIFQTRELALANYASAPSRQFFEFIWLLYYAEYFVYVFI

SEQ ID NO: 33 - DNA, 951 bp, synthetic construct
  source 1..951: mol_type = other DNA
attgaaggttcaccacatcatgaatctgataactcaatcgcaactaaaattttgaactttggtcatacatgttggaaattgcaaagaccatacgttgttaagggtatgatttctattgcttgtggtttatttggtagagaattgtttaataacagacatttgttttcttggggtttgatggttaaagcatttttcgcattagttccaatcttgtcttttaatttctttgctgcaatcatgaaccaaatatatgatgttgatattgatagaattaataagccagatttgccattggtttctggtgaaatgtcaatcgaaactgcttggattttatctatcatcgttgcattgactggtttgatcgttacaattaaattaaaatcagctccattgttcgtttttatatatatcttcggtatcttcgctggttttgcatactctgttccaccaattagatggaagcaatacccttttactaatttcttgatcacaatttcttcacatgttggtttggcttttacttcttactcagctactacatctgcattaggtttgccatttgtttggaggccagctttttcttttattatcgcttttatgactgttatgggtatgacaatcgctttcgcaaaggatatctctgatattgaaggtgacgctaaatacggtgtttcaactgttgctacaaaattgggtgcaagaaacatgactttcgttgtttctggtgttttgttgttgaactatttggtttctatctcaatcggtattatttggccacaagtttttaaatctaacatcatgatcttgtcacatgctatcttggcattctgtttgatcttccaaacaagagaattagctttggcaaattatgcttctgcaccatcaagacaatttttcgagtttatttggttgttgtactacgctgaatattttgtttacgtttttatttga

SEQ ID NO: 34 - protein, 316 aa, synthetic construct
IEGSPHHESDNSIATKILNFGHTCWKLQRPYVVKGMISIACGLFGRELFNNRHLFSWGLMVKAFFALVPILSFNFFAAIMNQIYDVDIDRINKPDLPLVSGEMSIETAWILSIIVALTGLIVTIKLKSAPLFVFIYIFGIFAGFAYSVPPIRWKQYPFTNFLITISSHVGLAFTSYSATTSALGLPFVWRPAFSFIIAFMTVMGMTIAFAKDISDIEGDAKYGVSTVATKLGARNMTFVVSGVLLLNYLVSISIGIIWPQVFKSNIMILSHAILAFCLIFQTRELALANYASAPSRQFFEFIWLLYYAEYFVYVFI

SEQ ID NO: 35 - DNA, 951 bp, synthetic construct
  source 1..951: mol_type = other DNA
attgaaggttcaccacatcatgaatctgataactcaatcgcaactaaaattttgaactttggtcatacatgttggaaattgcaaagaccatacgttgttaagggtatgatttctattgcttgtggtttatttggtagagaattgtttaataacagacatttgttttcttggggtttgatgtggaaagcaatgttcgcattagttccaatcttgtcttttaatttctttgctgcaatcatgaaccaaatatatgatgttgatattgatagaattaataagccagatttgccattggtttctggtgaaatgtcaatcgaaactgcttggattttatctatcatcgttgcattgactggtttgatcgttacaattaaattaaaatcagctccattgttcgtttttatatatatcttcggtatcttcgctggttttgcatactctgttccaccaattagatggaagcaatacccttttactaatttcttgatcacaatttcttcacatgttggtttggcttttacttcttactcagctactacatctgcattaggtttgccatttgtttggaggccagctttttcttttattatcgcttttatgactgttatgggtatgacaatcgctttcgcaaaggatatctctgatattgaaggtgacgctaaatacggtgtttcaactgttgctacaaaattgggtgcaagaaacatgactttcgttgtttctggtgttttgttgttgaactatttggtttctatctcaatcggtattatttggccacaagtttttaaatctaacatcatgatcttgtcacatgctatcttggcattctgtttgatcttccaaacaagagaattagctttggcaaattatgcttctgcaccatcaagacaatttttcgagtttatttggttgttgtactacgctgaatattttgtttacgtttttatttga

SEQ ID NO: 36 - protein, 316 aa, synthetic construct
IEGSPHHESDNSIATKILNFGHTCWKLQRPYVVKGMISIACGLFGRELFNNRHLFSWGLMWKAMFALVPILSFNFFAAIMNQIYDVDIDRINKPDLPLVSGEMSIETAWILSIIVALTGLIVTIKLKSAPLFVFIYIFGIFAGFAYSVPPIRWKQYPFTNFLITISSHVGLAFTSYSATTSALGLPFVWRPAFSFIIAFMTVMGMTIAFAKDISDIEGDAKYGVSTVATKLGARNMTFVVSGVLLLNYLVSISIGIIWPQVFKSNIMILSHAILAFCLIFQTRELALANYASAPSRQFFEFIWLLYYAEYFVYVFI

SEQ ID NO: 37 - DNA, 951 bp, synthetic construct
  source 1..951: mol_type = other DNA
attgaaggttcaccacatcatgaatctgataactcaatcgcaactaaaattttgaactttggtcatacatgttggaaattgcaaagaccatacgttgttaagggtatgatttctattgcttgtggtttatttggtagagaattgtttaataacagacatttgttttcttggggtttgatgtggaaagcactgttcgcattagttccaatcttgtcttttaatttctttgctgcaatcatgaaccaaatatatgatgttgatattgatagaattaataagccagatttgccattggtttctggtgaaatgtcaatcgaaactgcttggattttatctatcatcgttgcattgactggtttgatcgttacaattaaattaaaatcagctccattgttcgtttttatatatatcttcggtatcttcgctggttttgcatactctgttccaccaattagatggaagcaatacccttttactaatttcttgatcacaatttcttcacatgttggtttggcttttacttcttactcagctactacatctgcattaggtttgccatttgtttggaggccagctttttcttttattatcgcttttatgactgttatgggtatgacaatcgctttcgcaaaggatatctctgatattgaaggtgacgctaaatacggtgtttcaactgttgctacaaaattgggtgcaagaaacatgactttcgttgtttctggtgttttgttgttgaactatttggtttctatctcaatcggtattatttggccacaagtttttaaatctaacatcatgatcttgtcacatgctatcttggcattctgtttgatcttccaaacaagagaattagctttggcaaattatgcttctgcaccatcaagacaatttttcgagtttatttggttgttgtactacgctgaatattttgtttacgtttttatttga

SEQ ID NO: 38 - protein, 316 aa, synthetic construct
IEGSPHHESDNSIATKILNFGHTCWKLQRPYVVKGMISIACGLFGRELFNNRHLFSWGLMWKALFALVPILSFNFFAAIMNQIYDVDIDRINKPDLPLVSGEMSIETAWILSIIVALTGLIVTIKLKSAPLFVFIYIFGIFAGFAYSVPPIRWKQYPFTNFLITISSHVGLAFTSYSATTSALGLPFVWRPAFSFIIAFMTVMGMTIAFAKDISDIEGDAKYGVSTVATKLGARNMTFVVSGVLLLNYLVSISIGIIWPQVFKSNIMILSHAILAFCLIFQTRELALANYASAPSRQFFEFIWLLYYAEYFVYVFI

SEQ ID NO: 39 - DNA, 951 bp, synthetic construct
  source 1..951: mol_type = other DNA
attgaaggttcaccacatcatgaatctgataactcaatcgcaactaaaattttgaactttggtcatacatgttggaaattgcaaagaccatacgttgttaagggtatgatttctattgcttgtggtttatttggtagagaattgtttaataacagacatttgttttcttggggtttgatgtggaaagcatttttcgcattagttccaatcttgtcttttaatttctttgctgcaatcatgaaccaaatatatgatgttgatattgatagaattaataagccagatttgccattggtttctggtgaaatgtcaatcgaaactgcttggattttatctatcatcgttgcattgactggtttgatcgttacaattaaattaaaatcagctccattgttcgttggtatatatatcttcggtatcttcgctggttttgcatactctgttccaccaattagatggaagcaatacccttttactaatttcttgatcacaatttcttcacatgttggtttggcttttacttcttactcagctactacatctgcattaggtttgccatttgtttggaggccagctttttcttttattatcgcttttatgactgttatgggtatgacaatcgctttcgcaaaggatatctctgatattgaaggtgacgctaaatacggtgtttcaactgttgctacaaaattgggtgcaagaaacatgactttcgttgtttctggtgttttgttgttgaactatttggtttctatctcaatcggtattatttggccacaagtttttaaatctaacatcatgatcttgtcacatgctatcttggcattctgtttgatcttccaaacaagagaattagctttggcaaattatgcttctgcaccatcaagacaatttttcgagtttatttggttgttgtactacgctgaatattttgtttacgtttttatttga

SEQ ID NO: 40 - protein, 316 aa, synthetic construct
IEGSPHHESDNSIATKILNFGHTCWKLQRPYVVKGMISIACGLFGRELFNNRHLFSWGLMWKAFFALVPILSFNFFAAIMNQIYDVDIDRINKPDLPLVSGEMSIETAWILSIIVALTGLIVTIKLKSAPLFVGIYIFGIFAGFAYSVPPIRWKQYPFTNFLITISSHVGLAFTSYSATTSALGLPFVWRPAFSFIIAFMTVMGMTIAFAKDISDIEGDAKYGVSTVATKLGARNMTFVVSGVLLLNYLVSISIGIIWPQVFKSNIMILSHAILAFCLIFQTRELALANYASAPSRQFFEFIWLLYYAEYFVYVFI

SEQ ID NO: 41 - DNA, 951 bp, synthetic construct
  source 1..951: mol_type = other DNA
attgaaggttcaccacatcatgaatctgataactcaatcgcaactaaaattttgaactttggtcatacatgttggaaattgcaaagaccatacgttgttaagggtatgatttctattgcttgtggtttatttggtagagaattgtttaataacagacatttgttttcttggggtttgatgtggaaagcatttttcgcattagttccaatcttgtcttttaatttctttgctgcagctatgaaccaaatatatgatgttgatattgatagaattaataagccagatttgccattggtttctggtgaaatgtcaatcgaaactgcttggattttatctatcatcgttgcattgactggtttgatcgttacaattaaattaaaatcagctccattgttcgtttttatatatatcttcggtatcttcgctggttttgcatactctgttccaccaattagatggaagcaatacccttttactaatttcttgatcacaatttcttcacatgttggtttggcttttacttcttactcagctactacatctgcattaggtttgccatttgtttggaggccagctttttcttttattatcgcttttatgactgttatgggtatgacaatcgctttcgcaaaggatatctctgatattgaaggtgacgctaaatacggtgtttcaactgttgctacaaaattgggtgcaagaaacatgactttcgttgtttctggtgttttgttgttgaactatttggtttctatctcaatcggtattatttggccacaagtttttaaatctaacatcatgatcttgtcacatgctatcttggcattctgtttgatcttccaaacaagagaattagctttggcaaattatgcttctgcaccatcaagacaatttttcgagtttatttggttgttgtactacgctgaatattttgtttacgtttttatttga

SEQ ID NO: 42 - protein, 316 aa, synthetic construct
IEGSPHHESDNSIATKILNFGHTCWKLQRPYVVKGMISIACGLFGRELFNNRHLFSWGLMWKAFFALVPILSFNFFAAAMNQIYDVDIDRINKPDLPLVSGEMSIETAWILSIIVALTGLIVTIKLKSAPLFVFIYIFGIFAGFAYSVPPIRWKQYPFTNFLITISSHVGLAFTSYSATTSALGLPFVWRPAFSFIIAFMTVMGMTIAFAKDISDIEGDAKYGVSTVATKLGARNMTFVVSGVLLLNYLVSISIGIIWPQVFKSNIMILSHAILAFCLIFQTRELALANYASAPSRQFFEFIWLLYYAEYFVYVFI

SEQ ID NO: 43 - DNA, 951 bp, synthetic construct
  source 1..951: mol_type = other DNA
attgaaggttcaccacatcatgaatctgataactcaatcgcaactaaaattttgaactttggtcatacatgttggaaattgcaaagaccatacgttgttaagggtatgatttctattgcttgtggtttatttggtagagaattgtttaataacagacatttgttttcttggggtttgatgtggaaagcatttttcgcattagttccaatcttgtcttttaatttctttgctgcaatcatgaaccaaatatatgatgttgatattgatagaattaataagccagatttgccattggtttctggtgaaatgtcaatcgaaactgcttggattttatctatcatcgttgcattgactggtttgatcgttacaattaaattaaaatcagctccattgttcgtttttatatatatcttcggtatcttcgctggttttgcatactctgttccaccaattagatggaagcaatacccttttactaatttcttgatcacaatttcttcacatgttggtttggcttttacttcttacgcggctactacatctgcattaggtttgccatttgtttggaggccagctttttcttttattatcgcttttatgactgttatgggtatgacaatcgctttcgcaaaggatatctctgatattgaaggtgacgctaaatacggtgtttcaactgttgctacaaaattgggtgcaagaaacatgactttcgttgtttctggtgttttgttgttgaactatttggtttctatctcaatcggtattatttggccacaagtttttaaatctaacatcatgatcttgtcacatgctatcttggcattctgtttgatcttccaaacaagagaattagctttggcaaattatgcttctgcaccatcaagacaatttttcgagtttatttggttgttgtactacgctgaatattttgtttacgtttttatttga

SEQ ID NO: 44 - protein, 316 aa, synthetic construct
IEGSPHHESDNSIATKILNFGHTCWKLQRPYVVKGMISIACGLFGRELFNNRHLFSWGLMWKAFFALVPILSFNFFAAIMNQIYDVDIDRINKPDLPLVSGEMSIETAWILSIIVALTGLIVTIKLKSAPLFVFIYIFGIFAGFAYSVPPIRWKQYPFTNFLITISSHVGLAFTSYAATTSALGLPFVWRPAFSFIIAFMTVMGMTIAFAKDISDIEGDAKYGVSTVATKLGARNMTFVVSGVLLLNYLVSISIGIIWPQVFKSNIMILSHAILAFCLIFQTRELALANYASAPSRQFFEFIWLLYYAEYFVYVFI

SEQ ID NO: 45 - DNA, 951 bp, synthetic construct
  source 1..951: mol_type = other DNA
attgaaggttcaccacatcatgaatctgataactcaatcgcaactaaaattttgaactttggtcatacatgttggaaattgcaaagaccatacgttgttaagggtatgatttctattgcttgtggtttatttggtagagaattgtttaataacagacatttgttttcttggggtttgatgtggaaagcatttttcgcattagttccaatcttgtcttttaatttctttgctgcaatcatgaaccaaatatatgatgttgatattgatagaattaataagccagatttgccattggtttctggtgaaatgtcaatcgaaactgcttggattttatctatcatcgttgcattgactggtttgatcgttacaattaaattaaaatcagctccattgttcgtttttatatatatcttcggtatcttcgctggttttgcatactctgttccaccaattagatggaagcaatacccttttactaatttcttgatcacaatttcttcacatgttggtttggctattacttcttactcagctactacatctgcattaggtttgccatttgtttggaggccagctttttcttttattatcgcttttatgactgttatgggtatgacaatcgctttcgcaaaggatatctctgatattgaaggtgacgctaaatacggtgtttcaactgttgctacaaaattgggtgcaagaaacatgactttcgttgtttctggtgttttgttgttgaactatttggtttctatctcaatcggtattatttggccacaagtttttaaatctaacatcatgatcttgtcacatgctatcttggcattctgtttgatcttccaaacaagagaattagctttggcaaattatgcttctgcaccatcaagacaatttttcgagtttatttggttgttgtactacgctgaatattttgtttacgtttttatttga

SEQ ID NO: 46 - protein, 316 aa, synthetic construct
IEGSPHHESDNSIATKILNFGHTCWKLQRPYVVKGMISIACGLFGRELFNNRHLFSWGLMWKAFFALVPILSFNFFAAIMNQIYDVDIDRINKPDLPLVSGEMSIETAWILSIIVALTGLIVTIKLKSAPLFVFIYIFGIFAGFAYSVPPIRWKQYPFTNFLITISSHVGLAITSYSATTSALGLPFVWRPAFSFIIAFMTVMGMTIAFAKDISDIEGDAKYGVSTVATKLGARNMTFVVSGVLLLNYLVSISIGIIWPQVFKSNIMILSHAILAFCLIFQTRELALANYASAPSRQFFEFIWLLYYAEYFVYVFI

SEQ ID NO: 47 - DNA, 951 bp, synthetic construct
  source 1..951: mol_type = other DNA
attgaaggttcaccacatcatgaatctgataactcaatcgcaactaaaattttgaactttggtcatacatgttggaaattgcaaagaccatacgttgttaagggtatgatttctattgcttgtggtttatttggtagagaattgtttaataacagacatttgttttcttggggtttgatgtggaaagcatttttcgcattagttccaatcttgtcttttaatttctttgctgcaatcatgaaccaaatatatgatgttgatattgatagaattaataagccagatttgccattggtttctggtgaaatgtcaatcgaaactgcttggattttatctatcatcgttgcattgactggtttgatcgttacaattaaattaaaatcagctccattgttcgtttttatatatatcttcggtatcttcgctggttttgcatactctgttccaccaattagattgaagcaatacccttttactaatttcttgatcacaatttcttcacatgttggtttggcttttacttcttactcagctactacatctgcattaggtttgccatttgtttggaggccagctttttcttttattatcgcttttatgactgttatgggtatgacaatcgctttcgcaaaggatatctctgatattgaaggtgacgctaaatacggtgtttcaactgttgctacaaaattgggtgcaagaaacatgactttcgttgtttctggtgttttgttgttgaactatttggtttctatctcaatcggtattatttggccacaagtttttaaatctaacatcatgatcttgtcacatgctatcttggcattctgtttgatcttccaaacaagagaattagctttggcaaattatgcttctgcaccatcaagacaatttttcgagtttatttggttgttgtactacgctgaatattttgtttacgtttttatttga

SEQ ID NO: 48 - protein, 316 aa, synthetic construct
IEGSPHHESDNSIATKILNFGHTCWKLQRPYVVKGMISIACGLFGRELFNNRHLFSWGLMWKAFFALVPILSFNFFAAIMNQIYDVDIDRINKPDLPLVSGEMSIETAWILSIIVALTGLIVTIKLKSAPLFVFIYIFGIFAGFAYSVPPIRLKQYPFTNFLITISSHVGLAFTSYSATTSALGLPFVWRPAFSFIIAFMTVMGMTIAFAKDISDIEGDAKYGVSTVATKLGARNMTFVVSGVLLLNYLVSISIGIIWPQVFKSNIMILSHAILAFCLIFQTRELALANYASAPSRQFFEFIWLLYYAEYFVYVFI

SEQ ID NO: 49 - DNA, 951 bp, synthetic construct
  source 1..951: mol_type = other DNA
attgaaggttcaccacatcatgaatctgataactcaatcgcaactaaaattttgaactttggtcatacatgttggaaattgcaaagaccatacgttgttaagggtatgatttctattgcttgtggtttatttggtagagaattgtttaataacagacatttgttttcttggggtttgatgtggaaagcagggttcgcattagttccaatcttgtcttttaatttctttgctgcaatcatgaaccaaatatatgatgttgatattgatagaattaataagccagatttgccattggtttctggtgaaatgtcaatcgaaactgcttggattttatctatcatcgttgcattgactggtttgatcgttacaattaaattaaaatcagctccattgttcgtttttatatatatcttcggtatcttcgctggttttgcatactctgttccaccaattagatggaagcaatacccttttactaatttcttgatcacaatttcttcacatgttggtttggcttttacttcttactcagctactacatctgcattaggtttgccatttgtttggaggccagctttttcttttattatcgcttttatgactgttatgggtatgacaatcgctttcgcaaaggatatctctgatattgaaggtgacgctaaatacggtgtttcaactgttgctacaaaattgggtgcaagaaacatgactttcgttgtttctggtgttttgttgttgaactatttggtttctatctcaatcggtattatttggccacaagtttttaaatctaacatcatgatcttgtcacatgctatcttggcattctgtttgatcttccaaacaagagaattagctttggcaaattatgcttctgcaccatcaagacaatttttcgagtttatttggttgttgtactacgctgaatattttgtttacgtttttatttga

SEQ ID NO: 50 - protein, 316 aa, synthetic construct
IEGSPHHESDNSIATKILNFGHTCWKLQRPYVVKGMISIACGLFGRELFNNRHLFSWGLMWKAGFALVPILSFNFFAAIMNQIYDVDIDRINKPDLPLVSGEMSIETAWILSIIVALTGLIVTIKLKSAPLFVFIYIFGIFAGFAYSVPPIRWKQYPFTNFLITISSHVGLAFTSYSATTSALGLPFVWRPAFSFIIAFMTVMGMTIAFAKDISDIEGDAKYGVSTVATKLGARNMTFVVSGVLLLNYLVSISIGIIWPQVFKSNIMILSHAILAFCLIFQTRELALANYASAPSRQFFEFIWLLYYAEYFVYVFI

SEQ ID NO: 51 - DNA, 951 bp, synthetic construct
  source 1..951: mol_type = other DNA
attgaaggttcaccacatcatgaatctgataactcaatcgcaactaaaattttgaactttggtcatacatgttggaaattgcaaagaccatacgttgttaagggtatgatttctattgcttgtggtttatttggtagagaattgtttaataacagacatttgttttcttggggtttgatgtggaaagcatttttcgcattagttccaatcttgtcttttaatttctttgctgcaagtatgaaccaaatatatgatgttgatattgatagaattaataagccagatttgccattggtttctggtgaaatgtcaatcgaaactgcttggattttatctatcatcgttgcattgactggtttgatcgttacaattaaattaaaatcagctccattgttcgtttttatatatatcttcggtatcttcgctggttttgcatactctgttccaccaattagatggaagcaatacccttttactaatttcttgatcacaatttcttcacatgttggtttggcttttacttcttactcagctactacatctgcattaggtttgccatttgtttggaggccagctttttcttttattatcgcttttatgactgttatgggtatgacaatcgctttcgcaaaggatatctctgatattgaaggtgacgctaaatacggtgtttcaactgttgctacaaaattgggtgcaagaaacatgactttcgttgtttctggtgttttgttgttgaactatttggtttctatctcaatcggtattatttggccacaagtttttaaatctaacatcatgatcttgtcacatgctatcttggcattctgtttgatcttccaaacaagagaattagctttggcaaattatgcttctgcaccatcaagacaatttttcgagtttatttggttgttgtactacgctgaatattttgtttacgtttttatttga

SEQ ID NO: 52 - protein, 316 aa, synthetic construct
IEGSPHHESDNSIATKILNFGHTCWKLQRPYVVKGMISIACGLFGRELFNNRHLFSWGLMWKAFFALVPILSFNFFAASMNQIYDVDIDRINKPDLPLVSGEMSIETAWILSIIVALTGLIVTIKLKSAPLFVFIYIFGIFAGFAYSVPPIRWKQYPFTNFLITISSHVGLAFTSYSATTSALGLPFVWRPAFSFIIAFMTVMGMTIAFAKDISDIEGDAKYGVSTVATKLGARNMTFVVSGVLLLNYLVSISIGIIWPQVFKSNIMILSHAILAFCLIFQTRELALANYASAPSRQFFEFIWLLYYAEYFVYVFI

SEQ ID NO: 53 - DNA, 951 bp, synthetic construct
  source 1..951: mol_type = other DNA
attgaaggttcaccacatcatgaatctgataactcaatcgcaactaaaattttgaactttggtcatacatgttggaaattgcaaagaccatacgttgttaagggtatgatttctattgcttgtggtttatttggtagagaattgtttaataacagacatttgttttcttggggtttgatgtggaaagcatttttcgcattagttccaatcttgtcttttaatttctttgctgcaatcatgaaccaaatatatgatgttgatattgatagaattaataagccagatttgccattggtttctggtgaaatgtcaatcgaaactgcttggattttatctatcatcgttgcattgactgggttgatcgttacaattaaattaaaatcagctccattgttcgtttttatatatatcttcggtatcttcgctggttttgcatactctgttccaccaattagatggaagcaatacccttttactaatttcttgatcacaatttcttcacatgttggtttggcttttacttcttactcagctactacatctgcattaggtttgccatttgtttggaggccagctttttcttttattatcgcttttatgactgttatgggtatgacaatcgctttcgcaaaggatatctctgatattgaaggtgacgctaaatacggtgtttcaactgttgctacaaaattgggtgcaagaaacatgactttcgttgtttctggtgttttgttgttgaactatttggtttctatctcaatcggtattatttggccacaagtttttaaatctaacatcatgatcttgtcacatgctatcttggcattctgtttgatcttccaaacaagagaattagctttggcaaattatgcttctgcaccatcaagacaatttttcgagtttatttggttgttgtactacgctgaatattttgtttacgtttttatttga

SEQ ID NO: 54 - protein, 316 aa, synthetic construct; identical to SEQ ID NO: 20

SEQ ID NO: 55 - DNA, 951 bp, synthetic construct
  source 1..951: mol_type = other DNA
attgaaggttcaccacatcatgaatctgataactcaatcgcaactaaaattttgaactttggtcatacatgttggaaattgcaaagaccatacgttgttaagggtatgatttctattgcttgtggtttatttggtagagaattgtttaataacagacatttgttttcttggggtttgatgtggaaagcatttttcgcattagttccaatcttgtcttttaatttctttgctgcaatcatgaaccaaatatatgatgttgatattgatagaattaataagccagatttgccattggtttctggtgaaatgtcaatcgaaactgcttggattttatctatcatcgttgcattgactggtttgatcgttacaattaaattaaaatcagctccattgttcgtttttatatatatcttcggtatcttcgctggttttgcatactctgttccaccaattcgttggaagcaatacccttttactaatttcttgatcacaatttcttcacatgttggtttggcttttacttcttactcagctactacatctgcattaggtttgccatttgtttggaggccagctttttcttttattatcgcttttatgactgttatgggtatgacaatcgctttcgcaaaggatatctctgatattgaaggtgacgctaaatacggtgtttcaactgttgctacaaaattgggtgcaagaaacatgactttcgttgtttctggtgttttgttgttgaactatttggtttctatctcaatcggtattatttggccacaagtttttaaatctaacatcatgatcttgtcacatgctatcttggcattctgtttgatcttccaaacaagagaattagctttggcaaattatgcttctgcaccatcaagacaatttttcgagtttatttggttgttgtactacgctgaatattttgtttacgtttttatttga

SEQ ID NO: 56 - protein, 316 aa, synthetic construct; identical to SEQ ID NO: 20

SEQ ID NO: 57 - DNA, 951 bp, synthetic construct
  source 1..951: mol_type = other DNA
attgaaggttcaccacatcatgaatctgataactcaatcgcaactaaaattttgaactttggtcatacatgttggaaattgcaaagaccatacgttgttaagggtatgatttctattgcttgtggtttatttggtagagaattgtttaataacagacatttgttttcttggggtttgatgtggaaagcatttttcgcattagttccaatcttgtcttttaatttctttgctgcaatcatgaaccaaatatatgatgttgatattgatagaattaataagccagatttgccattggtttctggtgaaatgtcaatcgaaactgcttggattttatctatcatcgttgcattgactggtttgatcgttacaattaaattaaaatcagctccattgttcgtttttatatatatcttcgggatcttcgctggttttgcatactctgttccaccaattagatggaagcaatacccttttactaatttcttgatcacaatttcttcacatgttggtttggcttttactgtgtactcagctactacatctgcattaggtttgccatttgtttggaggccagctttttcttttattatcgcttttatgactgttatgggtatgacaatcgctttcgcaaaggatatctctgatattgaaggtgacgctaaatacggtgtttcaactgttgctacaaaattgggtgcaagaaacatgactttcgttgtttctggtgttttgttgttgaactatttggtttctatctcaatcggtattatttggccacaagtttttaaatctaacatcatgatcttgtcacatgctatcttggcattctgtttgatcttccaaacaagagaattagctttggcaaattatgcttctgcaccatcaagacaatttttcgagtttatttggttgttgtactacgctgaatattttgtttacgtttttatttga

SEQ ID NO: 58 - protein, 316 aa, synthetic construct; identical to SEQ ID NO: 30

SEQ ID NO: 59 - DNA, 951 bp, synthetic construct
  source 1..951: mol_type = other DNA
attgaaggttcaccacatcatgaatctgataactcaatcgcaactaaaattttgaactttggtcatacatgttggaaattgcaaagaccatacgttgttaagggtatgatttctattgcttgtggtttatttggtagagaattgtttaataacagacatttgttttcttggggtttgatgtggaaagcatttttcgcattagttccaatcttgtcttttaatttctttgctgcaatcgtgaaccaaatatatgatgttgatattgatagaattaataagccagatttgccattggtttctggtgaaatgtcaatcgaaactgcttggattttatctatcatcgttgcattgactggtttgatcgttacaattaaattaaaatcagctccattgttcgtttttatatatatcttcggtatcttcgctggttttgcatactctgttccaccaattagatggaagcaatacccttttactaatttcttgatcacaatttcttcacatgttggtttggcttttacttcttactcagctactacatctgcattaggtttgccatttgtttggaggccagctttttcttttattatcgcttttatgactgttatgggtatgacaatcgctttcgcaaaggatatctctgatattgaaggtgacgctaaatacggtgtttcaactgttgctacaaaattgggtgcaagaaacatgactttcgttgtttctggtgttttgttgttgaactatttggtttctatctcaatcggtattatttggccacaagtttttaaatctaacatcatgatcttgtcacatgctatcttggcattctgtttgatcttccaaacaagagaattagctttggcaaattatgcttctgcaccatcaagacaatttttcgagtttatttggttgttgtactacgctgaatattttgtttacgtttttatttga

SEQ ID NO: 60 - protein, 316 aa, synthetic construct
IEGSPHHESDNSIATKILNFGHTCWKLQRPYVVKGMISIACGLFGRELFNNRHLFSWGLMWKAFFALVPILSFNFFAAIVNQIYDVDIDRINKPDLPLVSGEMSIETAWILSIIVALTGLIVTIKLKSAPLFVFIYIFGIFAGFAYSVPPIRWKQYPFTNFLITISSHVGLAFTSYSATTSALGLPFVWRPAFSFIIAFMTVMGMTIAFAKDISDIEGDAKYGVSTVATKLGARNMTFVVSGVLLLNYLVSISIGIIWPQVFKSNIMILSHAILAFCLIFQTRELALANYASAPSRQFFEFIWLLYYAEYFVYVFI

SEQ ID NO: 61 - DNA, 951 bp, synthetic construct
  source 1..951: mol_type = other DNA
attgaaggttcaccacatcatgaatctgataactcaatcgcaactaaaattttgaactttggtcatacatgttggaaattgcaaagaccatacgttgttaagggtatgatttctattgcttgtggtttatttggtagagaattgtttaataacagacatttgttttcttggggtttgatgtggaaagcatttttcgcattagttccaatcttgtcttttaatttctttgctgcagcgatgaaccaaatatatgatgttgatattgatagaattaataagccagatttgccattggtttctggtgaaatgtcaatcgaaactgcttggattttatctatcatcgttgcattgactggtttgatcgttacaattaaattaaaatcagctccattgttcgtttttatatatatcttcggtatcttcgctggttttgcatactctgttccaccaattagatggaagcaatacccttttactaatttcttgatcacaatttcttcacatgttggtttggcttttacttcttactcagctactacatctgcattaggtttgccatttgtttggaggccagctttttcttttattatcgcttttatgactgttatgggtatgacaatcgctttcgcaaaggatatctctgatattgaaggtgacgctaaatacggtgtttcaactgttgctacaaaattgggtgcaagaaacatgactttcgttgtttctggtgttttgttgttgaactatttggtttctatctcaatcggtattatttggccacaagtttttaaatctaacatcatgatcttgtcacatgctatcttggcattctgtttgatcttccaaacaagagaattagctttggcaaattatgcttctgcaccatcaagacaatttttcgagtttatttggttgttgtactacgctgaatattttgtttacgtttttatttga

SEQ ID NO: 62 - protein, 316 aa, synthetic construct; identical to SEQ ID NO: 42

SEQ ID NO: 63 - DNA, 951 bp, synthetic construct
  source 1..951: mol_type = other DNA
attgaaggttcaccacatcatgaatctgataactcaatcgcaactaaaattttgaactttggtcatacatgttggaaattgcaaagaccatacgttgttaagggtatgatttctattgcttgtggtttatttggtagagaattgtttaataacagacatttgttttcttggggtttgatgtggaaagcatttttcgcattagttccaatcttgtcttttaatttctttgctgcaatcatgaaccaaatatatgatgttgatattgatagaattaataagccagatttgccattggtttctggtgaaatgtcaatcgaaactgcttggattttatctatcatcgttgcattgactggtttgatcgttacaattaaattaaaatcagctccattgttcgtttttatatatatcttcggtatcttcgctggttttgcatactctgttccaccaattagatggaagcaatacccttttactaatttcttgatcacaatttcttcacatgttggtttggcttttacttcttactcagctactacacgggcattaggtttgccatttgtttggaggccagctttttcttttattatcgcttttatgactgttatgggtatgacaatcgctttcgcaaaggatatctctgatattgaaggtgacgctaaatacggtgtttcaactgttgctacaaaattgggtgcaagaaacatgactttcgttgtttctggtgttttgttgttgaactatttggtttctatctcaatcggtattatttggccacaagtttttaaatctaacatcatgatcttgtcacatgctatcttggcattctgtttgatcttccaaacaagagaattagctttggcaaattatgcttctgcaccatcaagacaatttttcgagtttatttggttgttgtactacgctgaatattttgtttacgtttttatttga

SEQ ID NO: 64 - protein, 316 aa, synthetic construct
IEGSPHHESDNSIATKILNFGHTCWKLQRPYVVKGMISIACGLFGRELFNNRHLFSWGLMWKAFFALVPILSFNFFAAIMNQIYDVDIDRINKPDLPLVSGEMSIETAWILSIIVALTGLIVTIKLKSAPLFVFIYIFGIFAGFAYSVPPIRWKQYPFTNFLITISSHVGLAFTSYSATTRALGLPFVWRPAFSFIIAFMTVMGMTIAFAKDISDIEGDAKYGVSTVATKLGARNMTFVVSGVLLLNYLVSISIGIIWPQVFKSNIMILSHAILAFCLIFQTRELALANYASAPSRQFFEFIWLLYYAEYFVYVFI

SEQ ID NO: 65 - DNA, 951 bp, synthetic construct
  source 1..951: mol_type = other DNA
attgaaggttcaccacatcatgaatctgataactcaatcgcaactaaaattttgaactttggtcatacatgttggaaattgcaaagaccatacgttgttaagggtatgatttctattgcttgtggtttatttggtagagaattgtttaataacagacatttgttttcttggggtttgatgtggaaagcatttttcgcattagttccaatcttgtcttttaatttctttgctgcaatcatgaaccaaatatatgatgttgatattgatagaattaataagccagatttgccattggtttctggtgaaatgtcaatcgaaactgcttggattttatctatcatcgttgcattgactggtttgatcgttacaattaaattaaaatcagctccattgttcgtttttatatatatcttcggtatcttcgctggttttgcatactctgttccaccaattagatggaagcaatacccttttactaatttcttgatcacaatttcttcacatgttggtttggcttttacttcttacggtgctactacatctgcattaggtttgccatttgtttggaggccagctttttcttttattatcgcttttatgactgttatgggtatgacaatcgctttcgcaaaggatatctctgatattgaaggtgacgctaaatacggtgtttcaactgttgctacaaaattgggtgcaagaaacatgactttcgttgtttctggtgttttgttgttgaactatttggtttctatctcaatcggtattatttggccacaagtttttaaatctaacatcatgatcttgtcacatgctatcttggcattctgtttgatcttccaaacaagagaattagctttggcaaattatgcttctgcaccatcaagacaatttttcgagtttatttggttgttgtactacgctgaatattttgtttacgtttttatttga

SEQ ID NO: 66 - protein, 316 aa, synthetic construct
IEGSPHHESDNSIATKILNFGHTCWKLQRPYVVKGMISIACGLFGRELFNNRHLFSWGLMWKAFFALVPILSFNFFAAIMNQIYDVDIDRINKPDLPLVSGEMSIETAWILSIIVALTGLIVTIKLKSAPLFVFIYIFGIFAGFAYSVPPIRWKQYPFTNFLITISSHVGLAFTSYGATTSALGLPFVWRPAFSFIIAFMTVMGMTIAFAKDISDIEGDAKYGVSTVATKLGARNMTFVVSGVLLLNYLVSISIGIIWPQVFKSNIMILSHAILAFCLIFQTRELALANYASAPSRQFFEFIWLLYYAEYFVYVFI

SEQ ID NO: 67 - DNA, 951 bp, synthetic construct
  source 1..951: mol_type = other DNA
attgaaggttcaccacatcatgaatctgataactcaatcgcaactaaaattttgaactttggtcatacatgttggaaattgcaaagaccatacgttgttaagggtatgatttctattgcttgtggtttatttggtagagaattgtttaataacagacatttgttttcttggggtttgatgtggaaagcatttttcgcattagttccaatcttgtcttttaatttctttgctgcaatcatgaaccaaatatatgatgttgatattgatagaattaataagccagatttgccattggtttctggtgaaatgtcaatcgaaactgcttggattttatcttggatcgttgcattgactggtttgatcgttacaattaaattaaaatcagctccattgttcgtttttatatatatcttcggtatcttcgctggttttgcatactctgttccaccaattagatggaagcaatacccttttactaatttcttgatcacaatttcttcacatgttggtttggcttttacttcttactcagctactacatctgcattaggtttgccatttgtttggaggccagctttttcttttattatcgcttttatgactgttatgggtatgacaatcgctttcgcaaaggatatctctgatattgaaggtgacgctaaatacggtgtttcaactgttgctacaaaattgggtgcaagaaacatgactttcgttgtttctggtgttttgttgttgaactatttggtttctatctcaatcggtattatttggccacaagtttttaaatctaacatcatgatcttgtcacatgctatcttggcattctgtttgatcttccaaacaagagaattagctttggcaaattatgcttctgcaccatcaagacaatttttcgagtttatttggttgttgtactacgctgaatattttgtttacgtttttatttga

SEQ ID NO: 68 - protein, 316 aa, synthetic construct
IEGSPHHESDNSIATKILNFGHTCWKLQRPYVVKGMISIACGLFGRELFNNRHLFSWGLMWKAFFALVPILSFNFFAAIMNQIYDVDIDRINKPDLPLVSGEMSIETAWILSWIVALTGLIVTIKLKSAPLFVFIYIFGIFAGFAYSVPPIRWKQYPFTNFLITISSHVGLAFTSYSATTSALGLPFVWRPAFSFIIAFMTVMGMTIAFAKDISDIEGDAKYGVSTVATKLGARNMTFVVSGVLLLNYLVSISIGIIWPQVFKSNIMILSHAILAFCLIFQTRELALANYASAPSRQFFEFIWLLYYAEYFVYVFI

SEQ ID NO: 69 - DNA, 951 bp, synthetic construct
  source 1..951: mol_type = other DNA
attgaaggttcaccacatcatgaatctgataactcaatcgcaactaaaattttgaactttggtcatacatgttggaaattgcaaagaccatacgttgttaagggtatgatttctattgcttgtggtttatttggtagagaattgtttaataacagacatttgttttcttggggtttgatgtggaaagcatttttcgcattagttccaatcttgtcttttaatttctttgctgcaatcatgaaccaaatatatgatgttgatattgatagaattaataagccagatttgccattggtttctggtgaaatgtcaatcgaaactgcttggattttatctatcatcgttgcattgactggtttgatcgttacaattaaattaaaatcagctccattgttcgttgggatatatatcttcggtatcttcgctggttttgcatactctgttccaccaattagatggaagcaatacccttttactaatttcttgatcacaatttcttcacatgttggtttggcttttacttcttactcagctactacatctgcattaggtttgccatttgtttggaggccagctttttcttttattatcgcttttatgactgttatgggtatgacaatcgctttcgcaaaggatatctctgatattgaaggtgacgctaaatacggtgtttcaactgttgctacaaaattgggtgcaagaaacatgactttcgttgtttctggtgttttgttgttgaactatttggtttctatctcaatcggtattatttggccacaagtttttaaatctaacatcatgatcttgtcacatgctatcttggcattctgtttgatcttccaaacaagagaattagctttggcaaattatgcttctgcaccatcaagacaatttttcgagtttatttggttgttgtactacgctgaatattttgtttacgtttttatttga

SEQ ID NO: 70 - protein, 316 aa, synthetic construct; identical to SEQ ID NO: 40

SEQ ID NO: 71 - DNA, 951 bp, synthetic construct
  source 1..951: mol_type = other DNA
attgaaggttcaccacatcatgaatctgataactcaatcgcaactaaaattttgaactttggtcatacatgttggaaattgcaaagaccatacgttgttaagggtatgatttctattgcttgtggtttatttggtagagaattgtttaataacagacatttgttttcttggggtttgatgtggaaagcatttttcgcattagttccaatcttgtcttttaatttctttgctgcaatcatgaaccaaatatatgatgttgatattgatagaattaataagccagatttgccattggtttctggtgaaatgtcaatccggactgcttggattttatctatcatcgttgcattgactggtttgatcgttacaattaaattaaaatcagctccattgttcgtttttatatatatcttcggtatcttcgctggttttgcatactctgttccaccaattagatggaagcaatacccttttactaatttcttgatcacaatttcttcacatgttggtttggcttttacttcttactcagctactacatctgcattaggtttgccatttgtttggaggccagctttttcttttattatcgcttttatgactgttatgggtatgacaatcgctttcgcaaaggatatctctgatattgaaggtgacgctaaatacggtgtttcaactgttgctacaaaattgggtgcaagaaacatgactttcgttgtttctggtgttttgttgttgaactatttggtttctatctcaatcggtattatttggccacaagtttttaaatctaacatcatgatcttgtcacatgctatcttggcattctgtttgatcttccaaacaagagaattagctttggcaaattatgcttctgcaccatcaagacaatttttcgagtttatttggttgttgtactacgctgaatattttgtttacgtttttatttga

SEQ ID NO: 72 - protein, 316 aa, synthetic construct; identical to SEQ ID NO: 26

SEQ ID NO: 73 - DNA, 951 bp, synthetic construct
  source 1..951: mol_type = other DNA
attgaaggttcaccacatcatgaatctgataactcaatcgcaactaaaattttgaactttggtcatacatgttggaaattgcaaagaccatacgttgttaagggtatgatttctattgcttgtggtttatttggtagagaattgtttaataacagacatttgttttcttggggtttgatgtggaaagcatttttcgcattagttccaatcttgtcttttaatttctttgctgcaatcatgaaccaaatatatgatgttgatattgatagaattaataagccagatttgccattggtttctggtgaaatgtcaatcgaaactgcttggattttatctatcatcgttgcattgactggtttgatcgttacaattaaattaaaatcagctccattgttcgtttttatatatatcttcggtatcttcgctggttttgcatactctgttccaccaattagactgaagcaatacccttttactaatttcttgatcacaatttcttcacatgttggtttggcttttacttcttactcagctactacatctgcattaggtttgccatttgtttggaggccagctttttcttttattatcgcttttatgactgttatgggtatgacaatcgctttcgcaaaggatatctctgatattgaaggtgacgctaaatacggtgtttcaactgttgctacaaaattgggtgcaagaaacatgactttcgttgtttctggtgttttgttgttgaactatttggtttctatctcaatcggtattatttggccacaagtttttaaatctaacatcatgatcttgtcacatgctatcttggcattctgtttgatcttccaaacaagagaattagctttggcaaattatgcttctgcaccatcaagacaatttttcgagtttatttggttgttgtactacgctgaatattttgtttacgtttttatttga

SEQ ID NO: 74 - protein, 316 aa, synthetic construct; identical to SEQ ID NO: 48

SEQ ID NO: 75 - DNA, 951 bp, synthetic construct
  source 1..951: mol_type = other DNA
attgaaggttcaccacatcatgaatctgataactcaatcgcaactaaaattttgaactttggtcatacatgttggaaattgcaaagaccatacgttgttaagggtatgatttctattgcttgtggtttatttggtagagaattgtttaataacagacatttgttttcttggggtttgatgtggaaagcatttttcgcattagttccaatcttgtcttttaatttctttgctgcaatcatgaaccaaatatatgatgttgatattgatagaattaataagccagatttgccattggtttctggtgaaatgtcaatcgaaactgcttggattttatctatcatcgttgcattgactggtttgatcgttacaattaaattaaaatcagctccattgttcgtttttatatatatcttcggtatcttcgctggttttgcatactctgttccaccaattagatggaagcaatacccttttactaatttcttgatcacaatttcttcacatgttggtttggcttttacttcttactcagctactaggtctgcattaggtttgccatttgtttggaggccagctttttcttttattatcgcttttatgactgttatgggtatgacaatcgctttcgcaaaggatatctctgatattgaaggtgacgctaaatacggtgtttcaactgttgctacaaaattgggtgcaagaaacatgactttcgttgtttctggtgttttgttgttgaactatttggtttctatctcaatcggtattatttggccacaagtttttaaatctaacatcatgatcttgtcacatgctatcttggcattctgtttgatcttccaaacaagagaattagctttggcaaattatgcttctgcaccatcaagacaatttttcgagtttatttggttgttgtactacgctgaatattttgtttacgtttttatttga

SEQ ID NO: 76 - protein, 316 aa, synthetic construct
IEGSPHHESDNSIATKILNFGHTCWKLQRPYVVKGMISIACGLFGRELFNNRHLFSWGLMWKAFFALVPILSFNFFAAIMNQIYDVDIDRINKPDLPLVSGEMSIETAWILSIIVALTGLIVTIKLKSAPLFVFIYIFGIFAGFAYSVPPIRWKQYPFTNFLITISSHVGLAFTSYSATRSALGLPFVWRPAFSFIIAFMTVMGMTIAFAKDISDIEGDAKYGVSTVATKLGARNMTFVVSGVLLLNYLVSISIGIIWPQVFKSNIMILSHAILAFCLIFQTRELALANYASAPSRQFFEFIWLLYYAEYFVYVFI

SEQ ID NO: 77 - DNA, 951 bp, synthetic construct
  source 1..951: mol_type = other DNA
attgaaggttcaccacatcatgaatctgataactcaatcgcaactaaaattttgaactttggtcatacatgttggaaattgcaaagaccatacgttgttaagggtatgatttctattgcttgtggtttatttggtagagaattgtttaataacagacatttgttttcttggggtttgatgtggaaagcatttttcgcattagttccaatcttgtcttttaatttctttgctgcaatcatgaaccaaatatatgatgttgatattgatagaattaataagccagatttgccattggtttctggtgaaatgtcaatcgaaactgcttggattttatctatcatcgttgcattgactggtttgatcgttacaattaaattaaaatcagctccattgttcgtttttatatatatcttcggtatcttcgctggttttgcatactctgttccaccaattagatggaagcaatacccttttactaatttcttgatcacaatttcttcacatgttggtttggcttttactacgtactcagctactacatctgcattaggtttgccatttgtttggaggccagctttttcttttattatcgcttttatgactgttatgggtatgacaatcgctttcgcaaaggatatctctgatattgaaggtgacgctaaatacggtgtttcaactgttgctacaaaattgggtgcaagaaacatgactttcgttgtttctggtgttttgttgttgaactatttggtttctatctcaatcggtattatttggccacaagtttttaaatctaacatcatgatcttgtcacatgctatcttggcattctgtttgatcttccaaacaagagaattagctttggcaaattatgcttctgcaccatcaagacaatttttcgagtttatttggttgttgtactacgctgaatattttgtttacgtttttatttga

SEQ ID NO: 78 - protein, 316 aa, synthetic construct
IEGSPHHESDNSIATKILNFGHTCWKLQRPYVVKGMISIACGLFGRELFNNRHLFSWGLMWKAFFALVPILSFNFFAAIMNQIYDVDIDRINKPDLPLVSGEMSIETAWILSIIVALTGLIVTIKLKSAPLFVFIYIFGIFAGFAYSVPPIRWKQYPFTNFLITISSHVGLAFTTYSATTSALGLPFVWRPAFSFIIAFMTVMGMTIAFAKDISDIEGDAKYGVSTVATKLGARNMTFVVSGVLLLNYLVSISIGIIWPQVFKSNIMILSHAILAFCLIFQTRELALANYASAPSRQFFEFIWLLYYAEYFVYVFI

SEQ ID NO: 79 - DNA, 951 bp, synthetic construct
  source 1..951: mol_type = other DNA
attgaaggttcaccacatcatgaatctgataactcaatcgcaactaaaattttgaactttggtcatacatgttggaaattgcaaagaccatacgttgttaagggtatgatttctattgcttgtggtttatttggtaaagaattgtttaataacagacatttgttttcttggggtttgatgtggaaagcaacgttcgcattagttccaatcttgtcttttaatttctttgctgcaatcatgaaccaaatatatgatgttgatattgatagaattaataagccagatttgccattggtttctggtgaaatgtcaatcgaaactgcttggattttatctatcatcgttgcattgactggtttgatcgttacaattaaattaaaatcagctccattgttcgtttttatatatatcttcggtatcttcgctggttttgcatactctgttccaccaattagatggaagcaatacccttttactaatttcttgatcacaatttcttcacatgttggtttggcttttacttcttactcagctactacatctgcattaggtttgccatttgtttggaggccagctttttcttttattatcgcttttatgactgttatgggtatgacaatcgctttcgcaaaggatatctctgatattgaaggtgacgctaaatacggtgtttcaactgttgctacaaaattgggtgcaagaaacatgactttcgttgtttctggtgttttgttgttgaactatttggtttctatctcaatcggtattatttggccacaagtttttaaatctaacatcatgatcttgtcacatgctatcttggcattctgtttgatcttccaaacaagagaattagctttggcaaattatgcttctgcaccatcaagacaatttttcgagtttatttggttgttgtactacgctgaatattttgtttacgtttttatttga

SEQ ID NO: 80 - protein, 316 aa, synthetic construct
IEGSPHHESDNSIATKILNFGHTCWKLQRPYVVKGMISIACGLFGKELFNNRHLFSWGLMWKATFALVPILSFNFFAAIMNQIYDVDIDRINKPDLPLVSGEMSIETAWILSIIVALTGLIVTIKLKSAPLFVFIYIFGIFAGFAYSVPPIRWKQYPFTNFLITISSHVGLAFTSYSATTSALGLPFVWRPAFSFIIAFMTVMGMTIAFAKDISDIEGDAKYGVSTVATKLGARNMTFVVSGVLLLNYLVSISIGIIWPQVFKSNIMILSHAILAFCLIFQTRELALANYASAPSRQFFEFIWLLYYAEYFVYVFI

SEQ ID NO: 81 - DNA, 951 bp, synthetic construct
  source 1..951: mol_type = other DNA
attgaaggttcaccacatcatgaatctgataactcaatcgcaactaaaattttgaactttggtcatacatgttggaaattgcaaagaccatacgttgttaagggtatgatttctattgcttgtggtttatttggtagagaattgtttaataacagacatttgttttcttggggtttgatgtggaaagcatttttcgcattagttccaatcttgtcttttaatttctttgctgcaatcatgaaccaaatatatgatgttgatattgatagaattaataagccagatttgccattggtttctggtgaaatgtcaatcgaaactgcttggattttatctatcatcgttgcattgactggtttgatcgttacaattaaattaaaatcagctccattgttcgtttttatatatatcttcggtatcttcgctggttttgcatactctgttccaccaattagatggaagcaatacccttttactaatttcttgatcacaatttcttcacatgttggtttggcttttacttcttacggggctactacatctgcattaggtttgccatttgtttggaggccagctttttcttttattatcgcttttatgactgttatgggtatgacaatcgctttcgcaaaggatatctctgatattgaaggtgacgctaaatacggtgtttcaactgttgctacaaaattgggtgcaagaaacatgactttcgttgtttctggtgttttgttgttgaactatttggtttctatctcaatcggtattatttggccacaagtttttaaatctaacatcatgatcttgtcacatgctatcttggcattctgtttgatcttccaaacaagagaattagctttggcaaattatgcttctgcaccatcaagacaatttttcgagtttatttggttgttgtactacgctgaatattttgtttacgtttttatttga

SEQ ID NO: 82 - protein, 316 aa, synthetic construct; identical to SEQ ID NO: 66

SEQ ID NO: 83 - DNA, 951 bp, synthetic construct
  source 1..951: mol_type = other DNA
attgaaggttcaccacatcatgaatctgataactcaatcgcaactaaaattttgaactttggtcatacatgttggaaattgcaaagaccatacgttgttaagggtatgatttctattgcttgtggtttatttggtagagaattgtttaataacagacatttgttttcttggggtttgatgtggaaagcatttttcgcattagttccaatcttgtcttttaatttctttgctgcaatcatgaaccaaatatatgatgttgatattgatagaattaataagccagatttgccattggtttctggtgaaatgtcaatcgaaactgcttggattttatctatcatcgttgcattgactggtttgatcgttacaattaaattaaaatcagctccattgtttgtttttatatatatcttcggtatcttcgctggttttgcatactctgttccaccaattagatggaagcaatacccttttactaatttcttgatcacaatttcttcacatgttggtttggcttttacttcttactcagctactacatctgcattaggtttgccatttgtttggaggccagctttttcttttattatcgcttttatgactgttatgggtatgacaatcgctttcgcaaaggatatctctgatattgaaggtgacgctaaatacggtgtttcaactgttgctacaaaattgggtgcaagaaacatgactttcgttgtttctggtgttttgttgttgaactatttggtttctatctcaatcggtattatttggccacaagtttttaaatctaacatcatgatcttgtcacatgctatcttggcattctgtttgatcttccaaacaagagaattagctttggcaaattatgcttctgcaccatcaagacaatttttcgagtttatttggttgttgtactacgctgaatattttgtttacgtttttatttga

SEQ ID NO: 84 - protein, 316 aa, synthetic construct; identical to SEQ ID NO: 20

SEQ ID NO: 85 - DNA, 951 bp, synthetic construct
  source 1..951: mol_type = other DNA
attgaaggttcaccacatcatgaatctgataactcaatcgcaactaaaattttgaactttggtcatacatgttggaaattgcaaagaccatacgttgttaagggtatgatttctattgcttgtggtttatttggtagagaattgtttaataacagacatttgttttcttggggtttgatgtggaaagcatttttcgcattagttccaatcttgtcttttaatttctttgctgcaatcatgaaccaaatatatgatgttgatattgatagaattaataagccagatttgccattggtttctggtgaaatgtcaatcgaaactgcttggattttatctatcatcgttgcattgactggtttgatcgttacaattaaattaaaatcagctccattgttcgtttttatatatatcttcggtatcttcgctggttttgcatactctgttccaccaattagatggaagcaatacccttttactaatttcttgatcacactttcttcacatgttggtttggcttttacttcttactcagctactacatctgcattaggtttgccatttgtttggaggccagctttttcttttattatcgcttttatgactgttatgggtatgacaatcgctttcgcaaaggatatctctgatattgaaggtgacgctaaatacggtgtttcaactgttgctacaaaattgggtgcaagaaacatgactttcgttgtttctggtgttttgttgttgaactatttggtttctatctcaatcggtattatttggccacaagtttttaaatctaacatcatgatcttgtcacatgctatcttggcattctgtttgatcttccaaacaagagaattagctttggcaaattatgcttctgcaccatcaagacaatttttcgagtttatttggttgttgtactacgctgaatattttgtttacgtttttatttga

SEQ ID NO: 86 - protein, 316 aa, synthetic construct
IEGSPHHESDNSIATKILNFGHTCWKLQRPYVVKGMISIACGLFGRELFNNRHLFSWGLMWKAFFALVPILSFNFFAAIMNQIYDVDIDRINKPDLPLVSGEMSIETAWILSIIVALTGLIVTIKLKSAPLFVFIYIFGIFAGFAYSVPPIRWKQYPFTNFLITLSSHVGLAFTSYSATTSALGLPFVWRPAFSFIIAFMTVMGMTIAFAKDISDIEGDAKYGVSTVATKLGARNMTFVVSGVLLLNYLVSISIGIIWPQVFKSNIMILSHAILAFCLIFQTRELALANYASAPSRQFFEFIWLLYYAEYFVYVFI

SEQ ID NO: 87 - DNA, 951 bp, synthetic construct
  source 1..951: mol_type = other DNA
attgaaggttcaccacatcatgaatctgataactcaatcgcaactaaaattttgaactttggtcatacatgttggaaattgcaaagaccatacgttgttaagggtatgatttctattgcttgtggtttatttggtagagaattgtttaataacagacatttgttttcttggggtttgatgtggaaagcatttttcgcattagttccaatcttgtcttttaatttctttgctgcaatcatgaaccaaatatatgatgttgatattgatagaattaataagccagatttgccattggtttctggtgaaatgtcaatcgaaactgcttggattttatctatcatcgttgcattgactggtttgatcgttacaattaaattaaaatcagctccattgttcgtttttatatatatcttcggtatcttcgctggttttgcatactctgttccaccaattagatggaagcaatacccttttactaatttcttgatcacaatttcttcacatgttggtttggcttttacttcttactcagctactgtttctgcattaggtttgccatttgtttggaggccagctttttcttttattatcgcttttatgactgttatgggtatgacaatcgctttcgcaaaggatatctctgatattgaaggtgacgctaaatacggtgtttcaactgttgctacaaaattgggtgcaagaaacatgactttcgttgtttctggtgttttgttgttgaactatttggtttctatctcaatcggtattatttggccacaagtttttaaatctaacatcatgatcttgtcacatgctatcttggcattctgtttgatcttccaaacaagagaattagctttggcaaattatgcttctgcaccatcaagacaatttttcgagtttatttggttgttgtactacgctgaatattttgtttacgtttttatttga

SEQ ID NO: 88 - protein, 316 aa, synthetic construct
IEGSPHHESDNSIATKILNFGHTCWKLQRPYVVKGMISIACGLFGRELFNNRHLFSWGLMWKAFFALVPILSFNFFAAIMNQIYDVDIDRINKPDLPLVSGEMSIETAWILSIIVALTGLIVTIKLKSAPLFVFIYIFGIFAGFAYSVPPIRWKQYPFTNFLITISSHVGLAFTSYSATVSALGLPFVWRPAFSFIIAFMTVMGMTIAFAKDISDIEGDAKYGVSTVATKLGARNMTFVVSGVLLLNYLVSISIGIIWPQVFKSNIMILSHAILAFCLIFQTRELALANYASAPSRQFFEFIWLLYYAEYFVYVFI

SEQ ID NO: 89 - DNA, 951 bp, synthetic construct
  source 1..951: mol_type = other DNA
attgaaggttcaccacatcatgaatctgataactcaatcgcaactaaaattttgaactttggtcatacatgttggaaattgcaaagaccatacgttgttaagggtatgatttctattgcttgtggtttatttggtagagaattgtttaataacagacatttgttttcttggggtttgatgtggaaagcatttttcgcattagttccaatcttgtcttttaattggtttgctgcaatcatgaaccaaatatatgatgttgatattgatagaattaataagccagatttgccattggtttctggtgaaatgtcaatcgaaactgcttggattttatctatcatcgttgcattgactggtttgatcgttacaattaaattaaaatcagctccattgttcgtttttatatatatcttcggtatcttcgctggttttgcatactctgttccaccaattagatggaagcaatacccttttactaatttcttgatcacaatttcttcacatgttggtttggcttttacttcttactcagctactacatctgcattaggtttgccatttgtttggaggccagctttttcttttattatcgcttttatgactgttatgggtatgacaatcgctttcgcaaaggatatctctgatattgaaggtgacgctaaatacggtgtttcaactgttgctacaaaattgggtgcaagaaacatgactttcgttgtttctggtgttttgttgttgaactatttggtttctatctcaatcggtattatttggccacaagtttttaaatctaacatcatgatcttgtcacatgctatcttggcattctgtttgatcttccaaacaagagaattagctttggcaaattatgcttctgcaccatcaagacaatttttcgagtttatttggttgttgtactacgctgaatattttgtttacgtttttatttga

SEQ ID NO: 90 - protein, 316 aa, synthetic construct
IEGSPHHESDNSIATKILNFGHTCWKLQRPYVVKGMISIACGLFGRELFNNRHLFSWGLMWKAFFALVPILSFNWFAAIMNQIYDVDIDRINKPDLPLVSGEMSIETAWILSIIVALTGLIVTIKLKSAPLFVFIYIFGIFAGFAYSVPPIRWKQYPFTNFLITISSHVGLAFTSYSATTSALGLPFVWRPAFSFIIAFMTVMGMTIAFAKDISDIEGDAKYGVSTVATKLGARNMTFVVSGVLLLNYLVSISIGIIWPQVFKSNIMILSHAILAFCLIFQTRELALANYASAPSRQFFEFIWLLYYAEYFVYVFI

SEQ ID NO: 91 - DNA, 951 bp, synthetic construct
  source 1..951: mol_type = other DNA
attgaaggttcaccacatcatgaatctgataactcaatcgcaactaaaattttgaactttggtcatacatgttggaaattgcaaagaccatacgttgttaagggtatgatttctattgcttgtggtttatttggtagagaattgtttaataacagacatttgttttcttggggtttgatgtggaaagcatttttcgcattagttccaatcttgtcttttaatttctttgctgcaatcatgaaccaaatatatgatgttgatattgatagaattaataagccagatttgccattggtttctggtgaaatgtcaatcgaaactgcttggattttatctatcatcgttgcattgactggtttgatcgttacaattaaattaaaatcagctccattgttcgtttttatatatatcttcggtatcttcgctggttttgcatactctgttccaccaattagatggaagcaatacccttttactaatttcttgatcacaatttcttcacatgttggtttggcttttacttcttacacggctactacatctgcattaggtttgccatttgtttggaggccagctttttcttttattatcgcttttatgactgttatgggtatgacaatcgctttcgcaaaggatatctctgatattgaaggtgacgctaaatacggtgtttcaactgttgctacaaaattgggtgcaagaaacatgactttcgttgtttctggtgttttgttgttgaactatttggtttctatctcaatcggtattatttggccacaagtttttaaatctaacatcatgatcttgtcacatgctatcttggcattctgtttgatcttccaaacaagagaattagctttggcaaattatgcttctgcaccatcaagacaatttttcgagtttatttggttgttgtactacgctgaatattttgtttacgtttttatttga

SEQ ID NO: 92 - protein, 316 aa, synthetic construct
IEGSPHHESDNSIATKILNFGHTCWKLQRPYVVKGMISIACGLFGRELFNNRHLFSWGLMWKAFFALVPILSFNFFAAIMNQIYDVDIDRINKPDLPLVSGEMSIETAWILSIIVALTGLIVTIKLKSAPLFVFIYIFGIFAGFAYSVPPIRWKQYPFTNFLITISSHVGLAFTSYTATTSALGLPFVWRPAFSFIIAFMTVMGMTIAFAKDISDIEGDAKYGVSTVATKLGARNMTFVVSGVLLLNYLVSISIGIIWPQVFKSNIMILSHAILAFCLIFQTRELALANYASAPSRQFFEFIWLLYYAEYFVYVFI

SEQ ID NO: 93 - DNA, 951 bp, synthetic construct
  source 1..951: mol_type = other DNA
attgaaggttcaccacatcatgaatctgataactcaatcgcaactaaaattttgaactttggtcatacatgttggaaattgcaaagaccatacgttgttaagggtatgatttctattgcttgtggtttatttggtagagaattgtttaataacagacatttgttttcttggggtttgatgtggaaagcatttttcgcattagttccaatcttgtcttttaatttctttgctgcaatcatgaaccaaatatatgatgttgatattgatagaattaataagccagatttgccattggtttctggtgaaatgtcaatcgaaactgcttggattttatctatcatcgttgcattgactggtttgatcgttacaattaaattaaaatcagctccattgttcgtttttatatatatcttcggtatcttcgctggttttgcatactctgttccaccaattagatggaagcaatacccttttactaatttcttgatcacaatttcttcacatgttggtttggcttttacttcttactcagctactttgtctgcattaggtttgccatttgtttggaggccagctttttcttttattatcgcttttatgactgttatgggtatgacaatcgctttcgcaaaggatatctctgatattgaaggtgacgctaaatacggtgtttcaactgttgctacaaaattgggtgcaagaaacatgactttcgttgtttctggtgttttgttgttgaactatttggtttctatctcaatcggtattatttggccacaagtttttaaatctaacatcatgatcttgtcacatgctatcttggcattctgtttgatcttccaaacaagagaattagctttggcaaattatgcttctgcaccatcaagacaatttttcgagtttatttggttgttgtactacgctgaatattttgtttacgtttttatttga

SEQ ID NO: 94 - protein, 316 aa, synthetic construct
IEGSPHHESDNSIATKILNFGHTCWKLQRPYVVKGMISIACGLFGRELFNNRHLFSWGLMWKAFFALVPILSFNFFAAIMNQIYDVDIDRINKPDLPLVSGEMSIETAWILSIIVALTGLIVTIKLKSAPLFVFIYIFGIFAGFAYSVPPIRWKQYPFTNFLITISSHVGLAFTSYSATLSALGLPFVWRPAFSFIIAFMTVMGMTIAFAKDISDIEGDAKYGVSTVATKLGARNMTFVVSGVLLLNYLVSISIGIIWPQVFKSNIMILSHAILAFCLIFQTRELALANYASAPSRQFFEFIWLLYYAEYFVYVFI

SEQ ID NO: 95 - DNA, 951 bp, synthetic construct
  source 1..951: mol_type = other DNA
attgaaggttcaccacatcatgaatctgataactcaatcgcaactaaaattttgaactttggtcatacatgttggaaattgcaaagaccatacgttgttaagggtatgatttctattgcttgtggtttatttggtagagaattgtttaataacagacatttgttttcttggggtttgatgtggaaagcatttttcgcattagttccaatcttgtcttttaatttctttgctgcaatcatgaaccaaatatatgatgttgatattgatagaattaataagccagatttgccattggtttctggtgaaatgtcaatcgaaactgcttggattttatctatcatcgttgcattgactggtttgatcgttacaattaaattaaaatcagctccattgttcgtttttatatatatcttcggtatcttcgctggttttgcatactctgttccaccaattagatggaagcaatacccttttactaatttcttgatcacaatttcttcacatgttggtttggcttttacttcttactcagctactacatctgcattaggtttgccatttgtttggaggccagctttttcttttattatcgcttttatgactgttatgggtatgacaatcgctttcgcaaaggatatctctgatattgaaggtgacgctaaatacggtgtttcaactgttgctacaaaattgggtgcaagaaacatgactttcgttgtttctggtgttttgttgttgaactatttggtttctatctcaatcggtattatttggccacaagtttttaaatctaacatcatgatcttgtcacatgctatcttggcattctgtttgatcttccaaacaagagaattagctttggcaaattatgcttctggtccatcaagacaatttttcgagtttatttggttgttgtactacgctgaatattttgtttacgtttttatttga

SEQ ID NO: 96 - protein, 316 aa, synthetic construct
IEGSPHHESDNSIATKILNFGHTCWKLQRPYVVKGMISIACGLFGRELFNNRHLFSWGLMWKAFFALVPILSFNFFAAIMNQIYDVDIDRINKPDLPLVSGEMSIETAWILSIIVALTGLIVTIKLKSAPLFVFIYIFGIFAGFAYSVPPIRWKQYPFTNFLITISSHVGLAFTSYSATTSALGLPFVWRPAFSFIIAFMTVMGMTIAFAKDISDIEGDAKYGVSTVATKLGARNMTFVVSGVLLLNYLVSISIGIIWPQVFKSNIMILSHAILAFCLIFQTRELALANYASGPSRQFFEFIWLLYYAEYFVYVFI

SEQ ID NO: 97 - DNA, 951 bp, synthetic construct
  source 1..951: mol_type = other DNA
attgaaggttcaccacatcatgaatctgataactcaatcgcaactaaaattttgaactttggtcatacatgttggaaattgcaaagaccatacgttgttaagggtatgatttctattgcttgtggtttatttggtagagaattgtttaataacagacatttgttttcttggggtttgatgtggaaagcatttttcgcattagttccaatcttgtcttttaatttctttgctgcaatcatgaaccaaatatatgatgttgatattgatagaattaataagccagatttgccattggtttctggtgaaatgtcaatcgaaactgcttggattttatctatcatcgttgcattgactggtttgatcgttacaattaaattaaaatcagctccattgttcgtttttatatatatcttcggtatcttcgctggttttgcatactctgttccaccaattagatggaagcaatacccttttactaatttcttgatcacaatttcttcacatgttggtttggcttttacttcttactcagctactacatctgcattaggtttgccatttgtttggaggccagctttttcttttattatcgcttttatgactgttatgggtatgacaatcgctttcgcaaaggatatctctgatattgaaggtgacgctaaatacggtgtttcaactgttgctacaaaattgggtgcaagatgtatgactttcgttgtttctggtgttttgttgttgaactatttggtttctatctcaatcggtattatttggccacaagtttttaaatctaacatcatgatcttgtcacatgctatcttggcattctgtttgatcttccaaacaagagaattagctttggcaaattatgcttctgcaccatcaagacaatttttcgagtttatttggttgttgtactacgctgaatattttgtttacgtttttatttga

SEQ ID NO: 98 - protein, 316 aa, synthetic construct
IEGSPHHESDNSIATKILNFGHTCWKLQRPYVVKGMISIACGLFGRELFNNRHLFSWGLMWKAFFALVPILSFNFFAAIMNQIYDVDIDRINKPDLPLVSGEMSIETAWILSIIVALTGLIVTIKLKSAPLFVFIYIFGIFAGFAYSVPPIRWKQYPFTNFLITISSHVGLAFTSYSATTSALGLPFVWRPAFSFIIAFMTVMGMTIAFAKDISDIEGDAKYGVSTVATKLGARCMTFVVSGVLLLNYLVSISIGIIWPQVFKSNIMILSHAILAFCLIFQTRELALANYASAPSRQFFEFIWLLYYAEYFVYVFI

SEQ ID NO: 99 - DNA, 951 bp, synthetic construct
  source 1..951: mol_type = other DNA
attgaaggttcaccacatcatgaatctgataactcaatcgcaactaaaattttgaactttggtcatacatgttggaaattgcaaagaccatacgttgttaagggtatgatttctattgcttgtggtttatttggtagagaattgtttaataacagacatttgttttcttggggtttgatgtggaaagcatttttcgcattagttccaatcttgtcttttaatttctttgctgcaatcatgaaccaaatatatgatgttgatattgatagaattaataagccagatttgccattggtttctggtgaaatgtcaatcgaaactgcttggattttatctatcatcgttgcattgactggtttgatcgttacaattaaattaaaatcagctccattgttcgtttttatatatatcttcggtatcttcgctggttttgcatactctgttccaccaattagatggaagcaatacccttttactaatgttttgatcacaatttcttcacatgttggtttggcttttacttcttactcagctactacatctgcattaggtttgccatttgtttggaggccagctttttcttttattatcgcttttatgactgttatgggtatgacaatcgctttcgcaaaggatatctctgatattgaaggtgacgctaaatacggtgtttcaactgttgctacaaaattgggtgcaagaaacatgactttcgttgtttctggtgttttgttgttgaactatttggtttctatctcaatcggtattatttggccacaagtttttaaatctaacatcatgatcttgtcacatgctatcttggcattctgtttgatcttccaaacaagagaattagctttggcaaattatgcttctgtgccatcaagacaatttttcgagtttatttggttgttgtactacgctgaatattttgtttacgtttttatttga

SEQ ID NO: 100 - protein, 316 aa, synthetic construct
IEGSPHHESDNSIATKILNFGHTCWKLQRPYVVKGMISIACGLFGRELFNNRHLFSWGLMWKAFFALVPILSFNFFAAIMNQIYDVDIDRINKPDLPLVSGEMSIETAWILSIIVALTGLIVTIKLKSAPLFVFIYIFGIFAGFAYSVPPIRWKQYPFTNVLITISSHVGLAFTSYSATTSALGLPFVWRPAFSFIIAFMTVMGMTIAFAKDISDIEGDAKYGVSTVATKLGARNMTFVVSGVLLLNYLVSISIGIIWPQVFKSNIMILSHAILAFCLIFQTRELALANYASVPSRQFFEFIWLLYYAEYFVYVFI

SEQ ID NO: 101 - DNA, 951 bp, synthetic construct
  source 1..951: mol_type = other DNA
attgaaggttcaccacatcatgaatctgataactcaatcgcaactaaaattttgaactttggtcatacatgttggaaattgcaaagaccatacgttgttaagggtatgatttctattgcttgtggtttatttggtagagaattgtttaataacagacatttgttttcttggggtttgatgtggaaagcatttttcgcattagttccaatcttgtcttttaatttctttgctgcaatcatgaaccaaatatatgatgttgatattgatagaattaataagccagatttgccattggtttctggtgaaatgtcaatcgaaactgcttggattttatctatcatcgttgcattgactggtttgatcgttacaattaaattaaaatcagctccattgttcgtttttatatatatcttcggtatcttcgctggttttgcatactctgttccaccaattagatggaagcaataccctgggactaatttcttgatcacaatttcttcacatgttggtttggcttttacttcttactcagctactacatctgcattaggtttgccatttgtttggaggccagctttttcttttattatcgcttttatgactgttatgggtatgacaatcgctttcgcaaaggatatctctgatattgaaggtgacgctaaatacggtgtttcaactgttgctacaaaattgggtgcaagaaacatgactttcgttgtttctggtgttttgttgttgaactatttggtttctatctcaatcggtattatttggccacaagtttttaaatctaacatcatgatcttgtcacatgctatcttggcattctgtttgatcttccaaacaagagaattagctttggcaaattatgcttctgcaccatcaagacaatttttcgagtttatttggttgttgtactacgctgaatattttgtttacgtttttatttga

SEQ ID NO: 102 - protein, 316 aa, synthetic construct
IEGSPHHESDNSIATKILNFGHTCWKLQRPYVVKGMISIACGLFGRELFNNRHLFSWGLMWKAFFALVPILSFNFFAAIMNQIYDVDIDRINKPDLPLVSGEMSIETAWILSIIVALTGLIVTIKLKSAPLFVFIYIFGIFAGFAYSVPPIRWKQYPGTNFLITISSHVGLAFTSYSATTSALGLPFVWRPAFSFIIAFMTVMGMTIAFAKDISDIEGDAKYGVSTVATKLGARNMTFVVSGVLLLNYLVSISIGIIWPQVFKSNIMILSHAILAFCLIFQTRELALANYASAPSRQFFEFIWLLYYAEYFVYVFI

SEQ ID NO: 103 - DNA, 951 bp, synthetic construct
  source 1..951: mol_type = other DNA
attgaaggttcaccacatcatgaatctgataactcaatcgcaactaaaattttgaactttggtcatacatgttggaaattgcaaagaccatacgttgttaagggtatgatttctattgcttgtggtttatttggtagagaattgtttaataacagacatttgttttcttggggtttgatgtggaaagcatttttcgcattagttccaatcttgtcttttaatttctttgctgcaatcatgaaccaaatatatgatgttgatattgatagaattaataagccagatttgccattggtttctggtgaaatgtcaatcgaaactgcttggattttatctatcatcgttgcattgactggtttgatcgttacaattaaattaaaatcagctccattgttcgtttttatatatatcttcggtatcttcgctggttttgcatactctgttccaccaattagatggaagcaatacccttttactaatttcttgatcacaatttcttcacatgttggtttggcttttacttcttactcagctactacatctgcattaggtttgccatttgtttggaggccagctttttcttttattatcgcttttatgactgttatgggtatgacaatcgctttcgcaaaggatatctctgatattgaaggtgacgctaaatacggtgtttcaactgttgctacaaaattgggtgcaagaaacatgactttcgttgtttctggtgttttgttgttgaactatttggtttctatctcaatcggtattatttggccacaagtttttaaatctaacatcatgatcttgtcacatgctatcttggcattctgtttgatcttccaaacaagagaattagctttggcaaattatgcttctgcaccagcgagacaatttttcgagtttatttggttgttgtactacgctgaatattttgtttacgtttttatttga

SEQ ID NO: 104 - protein, 316 aa, synthetic construct
IEGSPHHESDNSIATKILNFGHTCWKLQRPYVVKGMISIACGLFGRELFNNRHLFSWGLMWKAFFALVPILSFNFFAAIMNQIYDVDIDRINKPDLPLVSGEMSIETAWILSIIVALTGLIVTIKLKSAPLFVFIYIFGIFAGFAYSVPPIRWKQYPFTNFLITISSHVGLAFTSYSATTSALGLPFVWRPAFSFIIAFMTVMGMTIAFAKDISDIEGDAKYGVSTVATKLGARNMTFVVSGVLLLNYLVSISIGIIWPQVFKSNIMILSHAILAFCLIFQTRELALANYASAPARQFFEFIWLLYYAEYFVYVFI

SEQ ID NO: 105 - DNA, 951 bp, synthetic construct
  source 1..951: mol_type = other DNA
attgaaggttcaccacatcatgaatctgataactcaatcgcaactaaaattttgaactttggtcatacatgttggaaattgcaaagaccatacgttgttaagggtatgatttctattgcttgtggtttatttggtagagaattgtttaataacagacatttgttttcttggggtttgatgtggaaagcatttttcgcattagttccaatcttgtcttttaatttctttgctgcaatcatgaaccaaatatatgatgttgatattgatagaattaataagccagatttgccattggtttctggtgaaatgtcaatcgaaactgcttggattttatctatcatcgttgcattgactggtttgatcgttacaattaaattaaaatcagctccattgttcgtttttatatatatcttcggtatcttcgctggttttgcatactctgttccaccaattagatggaagcaatacccttttactaatttcttgatcacaatttcttcacatgttggtttggcttttacttcttactcagctactacatctgcattaggtttgccatttgtttggaggccagctttttcttttattatcgcttttatgactgttatgggtatgacaatcgctttcgcaaaggatatctctgatattgaaggtgacgctaaatacggtgtttcaactgttgctacaaaattgggtgcaagaaacatgactttcgttgtttctggtgttttgttgttgaactatttggtttctatctcaatcggtattatttggccacaagtttttaaatctaacatcatgatcttgtcacatgctatcttggcattctgtttgatcttccaaacaagacggttagctttggcaaattatgcttctgcaccatcaagacaatttttcgagtttatttggttgttgtactacgctgaatattttgtttacgtttttatttga

SEQ ID NO: 106 - protein, 316 aa, synthetic construct
IEGSPHHESDNSIATKILNFGHTCWKLQRPYVVKGMISIACGLFGRELFNNRHLFSWGLMWKAFFALVPILSFNFFAAIMNQIYDVDIDRINKPDLPLVSGEMSIETAWILSIIVALTGLIVTIKLKSAPLFVFIYIFGIFAGFAYSVPPIRWKQYPFTNFLITISSHVGLAFTSYSATTSALGLPFVWRPAFSFIIAFMTVMGMTIAFAKDISDIEGDAKYGVSTVATKLGARNMTFVVSGVLLLNYLVSISIGIIWPQVFKSNIMILSHAILAFCLIFQTRRLALANYASAPSRQFFEFIWLLYYAEYFVYVFI

SEQ ID NO: 107 - DNA, 951 bp, synthetic construct
  source 1..951: mol_type = other DNA
attgaaggttcaccacatcatgaatctgataactcaatcgcaactaaaattttgaactttggtcatacatgttggaaattgcaaagaccatacgttgttaagggtatgatttctattgcttgtggtttatttggtagagaattgtttgataacagacatttgttttcttggggtttgatgtggaaagcatttttcgcattagttccaatcttgtcttttaatttctttgctgcaatcatgaaccaaatatatgatgttgatattgatagaattaataagccagatttgccattggtttctggtgaaatgtcaatcgaaactgcttggattttatctatcatcgttgcattgactggtttgatcgttacaattaaattaaaatcagctccattgttcgtttttatatatatcttcggtatcttcgctggttttgcatactctgttccaccaattagatggaagcaatacccttttactaatttcttgatcacaatttcttcacatgttggtttggcttttacttcttactcagctactacatctgcattaggtttgccatttgtttggaggccagctttttcttttattatcgcttttatgactgttatgggtatgacaatcgctttcgcaaaggatatctctgatattgaaggtgacgctaaatacggtgtttcaactgttgctacaaaattgggtgcaagaaacatgactttcgttgtttctggtgttttgttgttgaactatttggtttctatctcaatcggtattatttggccacaagtttttaaatctaacatcatgatcttgtcacatgctatcttggcattctgtttgatcttccaaacaagaaggttagctttggcaaattatgcttctgcaccatcaagacaatttttcgagtttatttggttgttgtactacgctgaatattttgtttacgtttttatttga

SEQ ID NO: 108 - protein, 316 aa, synthetic construct
IEGSPHHESDNSIATKILNFGHTCWKLQRPYVVKGMISIACGLFGRELFDNRHLFSWGLMWKAFFALVPILSFNFFAAIMNQIYDVDIDRINKPDLPLVSGEMSIETAWILSIIVALTGLIVTIKLKSAPLFVFIYIFGIFAGFAYSVPPIRWKQYPFTNFLITISSHVGLAFTSYSATTSALGLPFVWRPAFSFIIAFMTVMGMTIAFAKDISDIEGDAKYGVSTVATKLGARNMTFVVSGVLLLNYLVSISIGIIWPQVFKSNIMILSHAILAFCLIFQTRRLALANYASAPSRQFFEFIWLLYYAEYFVYVFI

SEQ ID NO: 109 - DNA, 951 bp, synthetic construct
  source 1..951: mol_type = other DNA
attgaaggttcaccacatcatgaatctgataactcaatcgcaactaaaattttgaactttggtcatacatgttggaaattgcaaagaccatacgttgttaagggtatgatttctattgcttgtggtttatttggtagagaattgtttaataacagacatttgttttcttggggtttgatgtggaaagcatttttcgcattagttccaatcttgtcttttaatttctttgctgcaatcatgaaccaaatatatgatgttgatattgatagaattaataagccagatttgccattggcgtctggtgaaatgtcaatcgaaactgcttggattttatctatcatcgttgcattgactggtttgatcgttacaattaaattaaaatcagctccattgttcgtttttatatatatcttcggtatcttcgctggttttgcatactctgttccaccaattagatggaagcaatacccttttactaatttcttgatcacaatttcttcacatgttggtttggcttttacttcttactcagctactacatctgcattaggtttgccatttgtttggaggccagctttttcttttattatcgcttttatgactgttatgggtatgacaatcgctttcgcaaaggatatctctgatattgaaggtgacgctaaatacggtgtttcaactgttgctacaaaattgggtgcaagaaacatgactttcgttgtttctggtgttttgttgttgaactatttggtttctatctcaatcggtattatttggccacaagtttttaaatctaacatcatgatcttgtcacatgctatcttggcattctgtttgatcttccaaacaagagaattagctttggcaaattatgcttctgcaccatcaagacaatttttcgagtttatttggttgttgtactacgctgaatattttgtttacgtttttatttga

SEQ ID NO: 110 - protein, 316 aa, synthetic construct
IEGSPHHESDNSIATKILNFGHTCWKLQRPYVVKGMISIACGLFGRELFNNRHLFSWGLMWKAFFALVPILSFNFFAAIMNQIYDVDIDRINKPDLPLASGEMSIETAWILSIIVALTGLIVTIKLKSAPLFVFIYIFGIFAGFAYSVPPIRWKQYPFTNFLITISSHVGLAFTSYSATTSALGLPFVWRPAFSFIIAFMTVMGMTIAFAKDISDIEGDAKYGVSTVATKLGARNMTFVVSGVLLLNYLVSISIGIIWPQVFKSNIMILSHAILAFCLIFQTRELALANYASAPSRQFFEFIWLLYYAEYFVYVFI

SEQ ID NO: 111 - DNA, 951 bp, synthetic construct
  source 1..951: mol_type = other DNA
attgaaggttcaccacatcatgaatctgataactcaatcgcaactaaaattttgaactttggtcatacatgttggaaattgcaaagaccatacgttgttaagggtatgatttctattgcttgtggtttatttggtagagaattgtttaataacagacatttgttttcttggggtttgatgtggaaagcatttttcgcattagttccaatcttgtcttttaatttctttgctgcaatcatgaaccaaatatatgatgttgatattgatagaattaataagccagatttgccattggtttctggtgaaatgtcaatcgaaactgcttggattttatctatcatcgttgcattgactggtttgatcgttacaattaaattaaaatcagctccattgttcgtttttatatatatcttcggtatcttcgctggttttgcatactctgttccaccaattagatggaagcaatacccttttactaatttcttgatcacaatttcttcacatgttggtttggcttttacttcttactcagctactacatctgcattaggtttgccatttgtttggaggccagctttttcttttattatcgcttttatgactgttatgggtatgacaatcgctttcgcaaaggatatctctgatattgaaggtgacgctaaatacggtgtttcaactgttgctacaaaattgggtgcaagaaacatgactttcgttgtttctggtgttttgttgttgaactatttggtttctatctcaatcggtattatttggccacaagtttttaaatctaacatcatgatcttgtcacatgctatcttggcattctgtttgatcttccaaacaagagatttagctttggcaaattatgcttctgcaccatcaagacaatttttcgagtttatttggttgttgtactacgctgaatattttgtttacgtttttatttga

SEQ ID NO: 112 - protein, 316 aa, synthetic construct
IEGSPHHESDNSIATKILNFGHTCWKLQRPYVVKGMISIACGLFGRELFNNRHLFSWGLMWKAFFALVPILSFNFFAAIMNQIYDVDIDRINKPDLPLVSGEMSIETAWILSIIVALTGLIVTIKLKSAPLFVFIYIFGIFAGFAYSVPPIRWKQYPFTNFLITISSHVGLAFTSYSATTSALGLPFVWRPAFSFIIAFMTVMGMTIAFAKDISDIEGDAKYGVSTVATKLGARNMTFVVSGVLLLNYLVSISIGIIWPQVFKSNIMILSHAILAFCLIFQTRDLALANYASAPSRQFFEFIWLLYYAEYFVYVFI

SEQ ID NO: 113 - DNA, 951 bp, synthetic construct
  source 1..951: mol_type = other DNA
attgaaggttcaccacatcatgaatctgataactcaatcgcaactaaaattttgaactttggtcatacatgttggaaattgcaaagaccatacgttgttaagggtatgatttctattgcttgtggtttatttggtagagaattgtttaataacagacatttgttttcttggggtttgatgtggaaagcatttttcgcattagttccaatcttgtcttttaatttctttgctgcaatcatgaaccaaatatatgatgttgatattgatagaattaataagccagatttgccattggtttctggtgaaatgtcaatcgaaactgcttggattttatctatcatcgttgcattgactggtttgatcgttacaattaaattaaaatcagctccattgttcgtttttatatatatcttcggtatcttcgctggttttgcatactctgttccaccaattagatggaagcaatacccttttactaatttcttgatcacaatttcttcacatgttggtttggcttttacttcttactcagctactacatctgcattaggtttgccatttgtttggaggccagctttttcttttattatcgcttttatgactgttatgggtatgacaatcgctttcgcaaaggatatctctgatattgaaggtgacgctaaatacggtgtttcaactgttgctacaaaattgggtgcaagaaacatgactttcgttgtttctggtgttttgttgttgaactatttggtttctatctcaatcggtattatttggccacaagtttttaaatctaacatcatgatcttgtcacatgctatcttggcattctgtttgatcttccaaacaagaaaattagctttggcaaattatgagtctgcaccatcaagacaatttttcgagtttatttggttgttgtactacgctgaatattttgtttacgtttttatttga

SEQ ID NO: 114 - protein, 316 aa, synthetic construct
IEGSPHHESDNSIATKILNFGHTCWKLQRPYVVKGMISIACGLFGRELFNNRHLFSWGLMWKAFFALVPILSFNFFAAIMNQIYDVDIDRINKPDLPLVSGEMSIETAWILSIIVALTGLIVTIKLKSAPLFVFIYIFGIFAGFAYSVPPIRWKQYPFTNFLITISSHVGLAFTSYSATTSALGLPFVWRPAFSFIIAFMTVMGMTIAFAKDISDIEGDAKYGVSTVATKLGARNMTFVVSGVLLLNYLVSISIGIIWPQVFKSNIMILSHAILAFCLIFQTRKLALANYESAPSRQFFEFIWLLYYAEYFVYVFI

SEQ ID NO: 115 - DNA, 951 bp, synthetic construct
  source 1..951: mol_type = other DNA
attgaaggttcaccacatcatgaatctgataactcaatcgcaactaaaattttgaactttggtcatacatgttggaaattgcaaagaccatacgttgttaagggtatgatttctattgcttgtggtttatttggtagagaattgtttaataacagacatttgttttcttggggtttgatgtggaaagcatttttcgcattagttccaatcttgtcttttaatttctttgctgcaatcatgaaccaaatatatgatgttgatattgatagaattaataagccagatttgccattggtttctggtgaaatgtcaatcgaaactgcttggattttatctatcatcgttgcattgactggtttgatcgttacaattaaattaaaatcagctccattgttcgtttttatatatatcttcggtatcttcgctggttttgcatactctgttccaccaattagatggaagcaatacccttttactaatttcttgatcacaatttcttcacatgttggtttggcttttacttcttactcagctactacatctgcattaggtttgccatttgtttggaggccagctttttcttttattatcgcttttatgactgttatgggtatgacaatcgctttcgcaaaggatatctctgatattgaaggtgacgctaaatacggtgtttcaactgttgctacaaaattgggtgcaagaaacatgactttcgttgtttctggtgttttgttgttgaactatttggtttctatctcaatcggtattatttggccacaagtttttaaatctaacatcatgatcttgtcacatgctatcttggcattctgtttgatcttccaaacaagagaattagctttggcaaattatgcttctgcagagtcaagacaatttttcgagtttatttggttgttgtactacgctgaatattttgtttacgtttttatttga

SEQ ID NO: 116 - protein, 316 aa, synthetic construct
IEGSPHHESDNSIATKILNFGHTCWKLQRPYVVKGMISIACGLFGRELFNNRHLFSWGLMWKAFFALVPILSFNFFAAIMNQIYDVDIDRINKPDLPLVSGEMSIETAWILSIIVALTGLIVTIKLKSAPLFVFIYIFGIFAGFAYSVPPIRWKQYPFTNFLITISSHVGLAFTSYSATTSALGLPFVWRPAFSFIIAFMTVMGMTIAFAKDISDIEGDAKYGVSTVATKLGARNMTFVVSGVLLLNYLVSISIGIIWPQVFKSNIMILSHAILAFCLIFQTRELALANYASAESRQFFEFIWLLYYAEYFVYVFI

SEQ ID NO: 117 - DNA, 951 bp, synthetic construct
  source 1..951: mol_type = other DNA
attgaaggttcaccacatcatgaatctgataactcaatcgcaactaaaattttgaactttggtcatacatgttggaaattgcaaagaccatacgttgttaagggtatgatttctattgcttgtggtttatttggtagagaattgtttaataacagacatttgttttcttggggtttgatgtggaaagcatttttcgcattagttccaatcttgtcttttaatttctttgctgcaatcatgaaccaaatatatgatgttgatattgatagaattaataagccagatttgccattggtttctggtgaaatgtcaatcgaaactgcttggattttatctatcatcgttgcattgactggtttgatcgttacaattaaattaaaatcagctccattgttcgtttttatatatatcttcggtatcttcgctggttttgcatactctgttccaccaattagatggaagcaatacccttttactaatttcttgatcacaatttcttcacatgttggtttggcttttacttcttactcagctactacatctgcattaggtttgccatttgtttggaggccagctttttcttttattatcgcttttatgactgttatgggtatgacaatcgctttcgcaaaggatatctctgatattgaaggtgacgctaaatacggtgtttcaactgttgctacaaaattgggtgcaagaaacatgactttcgttgtttctggtgttttgttgttgaactatttggtttctatctcaatcggtattatttggccacaagtttttaaatctaacatcatgatcttgtcacatgctatcttggcattctgtttgatcttccaaacaagaaggttagctttggcaaattatgcttctgcaccatcaagacaatttttcgagtttatttggttgttgtactacgctgaatattttgtttacgtttttatttga

SEQ ID NO: 118 - protein, 316 aa, synthetic construct; identical to SEQ ID NO: 106

SEQ ID NO: 119 - DNA, 951 bp, synthetic construct
  source 1..951: mol_type = other DNA
attgaaggttcaccacatcatgaatctgataactcaatcgcaactaaaattttgaactttggtcatacatgttggaaattgcaaagaccatacgttgttaagggtatgatttctattgcttgtggtttatttggtagagaattgtttaataacagacatttgttttcttggggtttgatgtggaaagcatttttcgcattagttccaatcttgtcttttaatttctttgctgcaatcatgaaccagatatatgatgttgatattgatagaattaataagccagatttgccattggtttctggtgaaatgtcaatcgaaactgcttggattttatctatcatcgttgcattgactggtttgatcgttacaattaaattaaaatcagctccattgttcgtttttatatatatcttcggtatcttcgctggttttgcatactctgttccaccaattagatggaagcaatacccttttactaatttcttgatcacaatttcttcacatgttggtttggcttttacttcttactcagctactacatctgcattaggtttgccatttgtttggaggccagctttttcttttattatcgcttttatgactgttatgggtatgacaatcgctttcgcaaaggatatctctgatattgaaggtgacgctaaatacggtgtttcaactgttgctacaaaattgggtgcaagaaacatgactttcgttgtttctggtgttttgttgttgaactatttggtttctatctcaatcggtattatttggccacaagtttttaaatctaacatcatgatcttgtcacatgctatcttggcattctgtttgatcttccaaacaagagaattagctttggcaaattatgcttctgcaccatcaagacaatttttcgagtttatttggttgttgtactacgctgaatattttgtttacgtttttatttga

SEQ ID NO: 120 - protein, 316 aa, synthetic construct; identical to SEQ ID NO: 20

SEQ ID NO: 121 - DNA, 951 bp, synthetic construct
  source 1..951: mol_type = other DNA
attgaaggttcaccacatcatgaatctgataactcaatcgcaactaaaattttgaactttggtcatacatgttggaaattgcaaagaccatacgttgttaagggtatgatttctattgcttgtggtttatttggtagagaattgtttaataacagacatttgttttcttggggtttgatgtggaaagcatttttcgcattagttccaatcttgtcttttaatttctttgctgcaatcatgaaccaaatatatgatgttgatattgatagaattaataagccagatttgccattggtttctggtgaaatgtcaatcgaaactgcttggattttatctatcatcgttgcattgactggtttgatcgttacaattaaattaaaatcagctccattgttcgtttttatatatatcttcggtatcttcgctggttttgcatactctgttccaccaattagatggaagcaatacccttttactaatttcttgatcacaatttcttcacatgttggtttggcttttacttcttactcagctactacatctgcattaggtttgccatttgtttggaggccagctttttcttttattatcgcttttatgactgttatgggtatgacaatcgctttcgcaaaggatatctctgatattgaaggtgacgctaaatacggtgtttcaactgttgctacaaaattgggtgcaagaaacatgactttcgttgtttctggtgttttgttgttgaactatttggtttctatctcaatcggtattatttggccacaagtttttaaatctaacatcatgatcttgtcacatgctatcttggcattctgtttgatcttccaaacaagagaattagctttggcaaattatgcttctaagccatcaagacaatttttcgagtttatttggttgttgtactacgctgaatattttgtttacgtttttatttga

SEQ ID NO: 122 - protein, 316 aa, synthetic construct
IEGSPHHESDNSIATKILNFGHTCWKLQRPYVVKGMISIACGLFGRELFNNRHLFSWGLMWKAFFALVPILSFNFFAAIMNQIYDVDIDRINKPDLPLVSGEMSIETAWILSIIVALTGLIVTIKLKSAPLFVFIYIFGIFAGFAYSVPPIRWKQYPFTNFLITISSHVGLAFTSYSATTSALGLPFVWRPAFSFIIAFMTVMGMTIAFAKDISDIEGDAKYGVSTVATKLGARNMTFVVSGVLLLNYLVSISIGIIWPQVFKSNIMILSHAILAFCLIFQTRELALANYASKPSRQFFEFIWLLYYAEYFVYVFI

SEQ ID NO: 123 - DNA, 951 bp, synthetic construct
  source 1..951: mol_type = other DNA
attgaaggttcaccacatcatgaatctgataactcaatcgcaactaaaattttgaactttggtcatacatgttggaaattgcaaagaccatacgttgttaagggtatgatttctattgcttgtggtttatttggtagagaattgtttaataacagacatttgttttcttggggtttgatgtggaaagcatttttcgcattagttccaatcttgtcttttaatttctttgctgcaatcatgaaccaaatatatgatgttgagattgatagaattaataagccagatttgccattggcgtctggtgaaatgtcaatcgaaactgcttggattttatctatcatcgttgcattgactggtttgatcgttacaattaaattaaaatcagctccattgttcgtttttatatatatcttcggtatcttcgctggttttgcatactctgttccaccaattagatggaagcaatacccttttactaatttcttgatcacaatttcttcacatgttggtttggcttttacttcttactcagctactacatctgcattaggtttgccatttgtttggaggccagctttttcttttattatcgcttttatgactgttatgggtatgacaatcgctttcgcaaaggatatctctgatattgaaggtgacgctaaatacggtgtttcaactgttgctacaaaattgggtgcaagaaacatgactttcgttgtttctggtgttttgttgttgaactatttggtttctatctcaatcggtattatttggccacaagtttttaaatctaacatcatgatcttgtcacatgctatcttggcattctgtttgatcttccaaacaagagaattagctttggcaaattatgcttctgcaccatcaagacaatttttcgagtttatttggttgttgtactacgctgaatattttgtttacgtttttatttga

SEQ ID NO: 124 - protein, 316 aa, synthetic construct
IEGSPHHESDNSIATKILNFGHTCWKLQRPYVVKGMISIACGLFGRELFNNRHLFSWGLMWKAFFALVPILSFNFFAAIMNQIYDVEIDRINKPDLPLASGEMSIETAWILSIIVALTGLIVTIKLKSAPLFVFIYIFGIFAGFAYSVPPIRWKQYPFTNFLITISSHVGLAFTSYSATTSALGLPFVWRPAFSFIIAFMTVMGMTIAFAKDISDIEGDAKYGVSTVATKLGARNMTFVVSGVLLLNYLVSISIGIIWPQVFKSNIMILSHAILAFCLIFQTRELALANYASAPSRQFFEFIWLLYYAEYFVYVFI

SEQ ID NO: 125 - DNA, 951 bp, synthetic construct
  source 1..951: mol_type = other DNA
attgaaggttcaccacatcatgaatctgataactcaatcgcaactaaaattttgaactttggtcatacatgttggaaattgcaaagaccatacgttgttaagggtatgatttctattgcttgtggtttatttggtagagaattgtttaataacagacatttgttttcttggggtttgatgtggaaagcatttttcgcattagttccaatcttgtcttttaatttctttgctgcaatcatgaaccaaatatatgatgttgatattgatagaattaataagccagatttgccattggtttctggtgaaatgtcaatcgaaactgcttggattttatctatcatcgttgcattgactggtttgatcgttacaattaaattaaaatcagctccattgttcgtttttatatatatcttcggtatcttcgctggttttgcatactctgttccaccaattagatggaagcaatacccttttactaatttcttgatcacaatttcttcacatgttggtttggcttttacttcttactcagctactacatctgcattaggtttgccatttgtttggaggccagctttttcttttattatcgcttttatgactgttatgggtatgacaatcgctttcgcaaaggatatctctgatattgaaggtgacgctaaatacggtgtttcaactgttgctacaaaattgggtgcaagagtgatgactttcgttgtttctggtgttttgttgttgaactatttggtttctatctcaatcggtattatttggccacaagtttttaaatctaacatcatgatcttgtcacatgctatcttggcattctgtttgatcttccaaacaagagaattagctttggcaaattatgcttctgcaccatcaagacaatttttcgagtttatttggttgttgtactacgctgaatattttgtttacgtttttatttga

SEQ ID NO: 126 - protein, 316 aa, synthetic construct
IEGSPHHESDNSIATKILNFGHTCWKLQRPYVVKGMISIACGLFGRELFNNRHLFSWGLMWKAFFALVPILSFNFFAAIMNQIYDVDIDRINKPDLPLVSGEMSIETAWILSIIVALTGLIVTIKLKSAPLFVFIYIFGIFAGFAYSVPPIRWKQYPFTNFLITISSHVGLAFTSYSATTSALGLPFVWRPAFSFIIAFMTVMGMTIAFAKDISDIEGDAKYGVSTVATKLGARVMTFVVSGVLLLNYLVSISIGIIWPQVFKSNIMILSHAILAFCLIFQTRELALANYASAPSRQFFEFIWLLYYAEYFVYVFI

SEQ ID NO: 127 - DNA, 951 bp, synthetic construct
  source 1..951: mol_type = other DNA
attgaaggttcaccacatcatgaatctgataactcaatcgcaactaaaattttgaactttggtcatacatgttggaaattgcaaagaccatacgttgttaagggtatgatttctattgcttgtggtttatttggtagagaattgtttaataacagacatttgttttcttggggtttgatgtggaaagcatttttcgcattagttccaatcttgtcttttaatttctttgctgcaatcatgaaccaaatatatgatgttgatattgatagaattaataagccagatttgccgttggtttctggtgaaatgtcaatcgaaactgcttggattttatctatcatcgttgcattgactggtttgatcgttacaattaaattaaaatcagctccattgttcgtttttatatatatcttcggtatcttcgctggttttgcatactctgttccaccaattagatggaagcaatacccttttactaatttcttgatcacaatttcttcacatgttggtttggcttttacttcttactcagctactacatctgcattaggtttgccatttgtttggaggccagctttttcttttattatcgcttttatgactgttatgggtatgacaatcgctttcgcaaaggatatctctgatattgaaggtgacgctaaatacggtgtttcaactgttgctacaaaattgggtgcaagaaacatgactttcgttgtttctggtgttttgttgttgaactatttggtttctatctcaatcggtattatttggccacaagtttttaaatctaacatcatgatcttgtcacatgctatcttggcattctgtttgatcttccaaacaagagaattagctttggcaaattatgcttctgcaccatcaagacaatttttcgagtttatttggttgttgtactacgctgaatattttgtttacgtttttatttga

SEQ ID NO: 128 - protein, 316 aa, synthetic construct; identical to SEQ ID NO: 20

SEQ ID NO: 129 - DNA, 951 bp, synthetic construct
  source 1..951: mol_type = other DNA
attgaaggttcaccacatcatgaatctgataactcaatcgcaactaaaattttgaactttggtcatacatgttggaaattgcaaagaccatacgttgttaagggtatgatttctattgcttgtggtttatttggtagagaattgtttaataacagacatttgttttcttggggtttgatgtggaaagcatttttcgcattagttccaatcttgtcttttaatttctttgctgcaatcatgaaccaaatatatgatgttgatattgatagaattaataagccagatttgccattggtttctggtgaaatgtcaatcgaaactgcttggattttatctatcatcgttgcattgactggtttgatcgttacaattaaattaaaatcagctccattgttcgtttttatatatatcttcggtatcttcgctggttttgcatactctgttccaccaattagatggaagcaatacccttttactaatgtgttgatcacaatttcttcacatgttggtttggcttttacttcttactcagctactacatctgcattaggtttgccatttgtttggaggccagctttttcttttattatcgcttttatgactgttatgggtatgacaatcgctttcgcaaaggatatctctgatattgaaggtgacgctaaatacggtgtttcaactgttgctacaaaattgggtgcaagaaacatgactttcgttgtttctggtgttttgttgttgaactatttggtttctatctcaatcggtattatttggccacaagtttttaaatctaacatcatgatcttgtcacatgctatcttggcattctgtttgatcttccaaacaagagaattagctttggcaaattatgcttctgcaccatcaagacaatttttcgagtttatttggttgttgtactacgctgaatattttgtttacgtttttatttga

SEQ ID NO: 130 - protein, 316 aa, synthetic construct
IEGSPHHESDNSIATKILNFGHTCWKLQRPYVVKGMISIACGLFGRELFNNRHLFSWGLMWKAFFALVPILSFNFFAAIMNQIYDVDIDRINKPDLPLVSGEMSIETAWILSIIVALTGLIVTIKLKSAPLFVFIYIFGIFAGFAYSVPPIRWKQYPFTNVLITISSHVGLAFTSYSATTSALGLPFVWRPAFSFIIAFMTVMGMTIAFAKDISDIEGDAKYGVSTVATKLGARNMTFVVSGVLLLNYLVSISIGIIWPQVFKSNIMILSHAILAFCLIFQTRELALANYASAPSRQFFEFIWLLYYAEYFVYVFI

SEQ ID NO: 131 - DNA, 951 bp, synthetic construct; identical to SEQ ID NO: 101
  source 1..951: mol_type = other DNA

SEQ ID NO: 132 - protein, 316 aa, synthetic construct; identical to SEQ ID NO: 102

SEQ ID NO: 133 - DNA, 951 bp, synthetic construct
  source 1..951: mol_type = other DNA
attgaaggttcaccacatcatgaatctgataactcaatcgcaactaaaattttgaactttggtcatacatgttggaaattgcaaagaccatacgttgttaagggtatgatttctattgcttgtggtttatttggtagagaattgtttaataacagacatttgttttcttggggtttgatgtggaaagcatttttcgcattagttccaatcttgtcttttaatttctttgctgcaatcatgaaccaaatatatgatgttgatattgatagaattaataagccagatttgccattggtttctggtgaaatgtcaatcgaaactgcttggattttatctatcatcgttgcattgactggtttgatcgttacaattaaattaaaatcagctccattgttcgtttttatatatatcttcggtatcttcgctggttttgcatactctgttccaccaattagatggaagcaatacccttttactaatttcttgatcacaatttcttcacatgttggtttggcttttacttcttactcagctactacatctgcattaggtttgccatttgtttggaggccagctttttcttttattatcgcttttatgactgttatgggtatgacaatcgctttcgcaaaggatatctctgatattgaaggtgacgctaaatacggtgtttcaactgttgctacaaaattgggtgcaagaaacatgactttcgttgtttctggtgttttgttgttgaactatttggtttctatctcaatcggtattatttggccacaagtttttaaatctaacatcatgatcttgtcacatgctatcttggcattctgtttgatcttccaaacaagaaagttagctttggcaaattatgcttctgcaccatcaagacaatttttcgagtttatttggttgttgtactacgctgaatattttgtttacgtttttatttga

SEQ ID NO: 134 - protein, 316 aa, synthetic construct
IEGSPHHESDNSIATKILNFGHTCWKLQRPYVVKGMISIACGLFGRELFNNRHLFSWGLMWKAFFALVPILSFNFFAAIMNQIYDVDIDRINKPDLPLVSGEMSIETAWILSIIVALTGLIVTIKLKSAPLFVFIYIFGIFAGFAYSVPPIRWKQYPFTNFLITISSHVGLAFTSYSATTSALGLPFVWRPAFSFIIAFMTVMGMTIAFAKDISDIEGDAKYGVSTVATKLGARNMTFVVSGVLLLNYLVSISIGIIWPQVFKSNIMILSHAILAFCLIFQTRKLALANYASAPSRQFFEFIWLLYYAEYFVYVFI

SEQ ID NO: 135 - DNA, 951 bp, synthetic construct
  source 1..951: mol_type = other DNA
attgaaggttcaccacatcatgaatctgataactcaatcgcaactaaaattttgaactttggtcatacatgttggaaattgcaaagaccatacgttgttaagggtatgatttctattgcttgtggtttatttggtagagaattgtttaataacagacatttgttttcttggggtttgatgtggaaagcatttttcgcattagttccaatcttgtcttttaatttctttgctgcaatcatgaaccaaatatatgatgttgatattgatagaattaataagccagatttgccattggtttctggtgaaatgtcaatcgaaactgcttggattttatctatcatcgttgcattgactggtttgatcgttacaattaaattaaaatcagctccattgttcgtttttatatatatcttcggtatcttcgctggttttgcatactctgttccaccaattagatggaagcaatacccttttactaatttcttgatcacaatttcttcacatgttggtttggcttttacttcttactcagctactacatctgcattaggtttgccatttgtttggaggccagctttttcttttattatcgcttttatgactgttatgggtatgacaatcgctttcgcaaaggatatctctgatattgaaggtgacgctaaatacggtgtttcaactgttgctgttaaattgggtgcaagaaacatgactttcgttgtttctggtgttttgttgttgaactatttggtttctatctcaatcggtattatttggccacaagtttttaaatctaacatcatgatcttgtcacatgctatcttggcattctgtttgatcttccaaacaagagaattagctttggcaaattatgcttctgcaccatcaagacaatttttcgagtttatttggttgttgtactacgctgaatattttgtttacgtttttatttga

SEQ ID NO: 136 - protein, 316 aa, synthetic construct
IEGSPHHESDNSIATKILNFGHTCWKLQRPYVVKGMISIACGLFGRELFNNRHLFSWGLMWKAFFALVPILSFNFFAAIMNQIYDVDIDRINKPDLPLVSGEMSIETAWILSIIVALTGLIVTIKLKSAPLFVFIYIFGIFAGFAYSVPPIRWKQYPFTNFLITISSHVGLAFTSYSATTSALGLPFVWRPAFSFIIAFMTVMGMTIAFAKDISDIEGDAKYGVSTVAVKLGARNMTFVVSGVLLLNYLVSISIGIIWPQVFKSNIMILSHAILAFCLIFQTRELALANYASAPSRQFFEFIWLLYYAEYFVYVFI

SEQ ID NO: 137 - DNA, 951 bp, synthetic construct
  source 1..951: mol_type = other DNA
attgaaggttcaccacatcatgaatctgataactcaatcgcaactaaaattttgaactttggtcatacatgttggaaattgcaaagaccatacgttgttaagggtatgatttctattgcttgtggtttatttggtagagaattgtttaataacagacatttgttttcttggggtttgatgtggaaagcatttttcgcattagttccaatcttgtcttttaatttctttgctgcaatcatgaaccaaatatatgatgttgatattgatagaattaataagccagatttgccattggtttctggtgaaatgtcaatcgaaactgcttggattttatctatcatcgttgcattgactggtttgatcgttacaattaaattaaaatcagctccattgttcgtttttatatatatcttcggtatcttcgctggttttgcatactctgttccaccaattagatggaagcaatacccttttactaatttcttgatcacaatttcttcacatgttggtttggcttttacttcttactcagctactacatctgcattaggtttgccatttgtttggaggccagctttttcttttattatcgcttttatgactgttatgggtatgacaatcgctttcgcaaaggatatctctgatattgaaggtgacgctaaatacggtgtttcaactgttgctacaaaattgggtgcaagaaagatgactttcgttgtttctggtgttttgttgttgaactatttggtttctatctcaatcggtattatttggccacaagtttttaaatctaacatcatgatcttgtcacatgctatcttggcattctgtttgatcttccaaacaagagaattagctttggcaaattatgcttctgcaccatcaagacaatttttcgagtttatttggttgttgtactacgctgaatattttgtttacgtttttatttga

SEQ ID NO: 138 - protein, 316 aa, synthetic construct
IEGSPHHESDNSIATKILNFGHTCWKLQRPYVVKGMISIACGLFGRELFNNRHLFSWGLMWKAFFALVPILSFNFFAAIMNQIYDVDIDRINKPDLPLVSGEMSIETAWILSIIVALTGLIVTIKLKSAPLFVFIYIFGIFAGFAYSVPPIRWKQYPFTNFLITISSHVGLAFTSYSATTSALGLPFVWRPAFSFIIAFMTVMGMTIAFAKDISDIEGDAKYGVSTVATKLGARKMTFVVSGVLLLNYLVSISIGIIWPQVFKSNIMILSHAILAFCLIFQTRELALANYASAPSRQFFEFIWLLYYAEYFVYVFI

SEQ ID NO: 139 - DNA, 951 bp, synthetic construct
  source 1..951: mol_type = other DNA
attgaaggttcaggtcattgtgaatctgataactcaatcgcaactaaaattttgaactttggtcatacatgttggaaattgcaaagaccatacgttgttaagggtatgatttctattgcttctggtttatttggtagagaattgtttaataacagacatttgttttcttggggtttgatgtggaaagcaactttcgcattagttccaatcttgtcttttaatttctttgctgcaatcatgaaccaaatatatgatgttgatattgatagaattaataagccagatttgccattggtttctggtgaaatgtcaatcgaaactgcttggattttatctatcatcgttgcattgactggtttgatcgttacaattaaattaaaatcagctccattgttcgttggtatatatatcttcggtatcttcgctggttttgcatactctgttccaccaattagatggaagcaatacccttttactaatttcttgatcacaatttcttcacatgttggtttggcttttactgtttacgctgctactacatctgcattaggtttgccatttgtttggaggccagctttttcttttattatcgcttttatgactgttatgtctatgacaatcgctttcgcaaaggatatctctgatattgaaggtgacgctaaatacggtgtttcaactgttgctacaaaattgggtgcaagaaacatgactttcgttgtttctggtgttttgttgttgaactatgctgtttctatctcaatcggtattatttggccacaagtttttaaatctaacatcatgatcttgtcacatgctatcttggcattctgtttgatcttccaaacaagagaattagctttggcaaattatgcttctgcaccagctagacaatttttcgagtttatttggttgttgtactacgctgaatattttgtttacgtttttatttga

SEQ ID NO: 140 - protein, 316 aa, synthetic construct
IEGSGHCESDNSIATKILNFGHTCWKLQRPYVVKGMISIASGLFGRELFNNRHLFSWGLMWKATFALVPILSFNFFAAIMNQIYDVDIDRINKPDLPLVSGEMSIETAWILSIIVALTGLIVTIKLKSAPLFVGIYIFGIFAGFAYSVPPIRWKQYPFTNFLITISSHVGLAFTVYAATTSALGLPFVWRPAFSFIIAFMTVMSMTIAFAKDISDIEGDAKYGVSTVATKLGARNMTFVVSGVLLLNYAVSISIGIIWPQVFKSNIMILSHAILAFCLIFQTRELALANYASAPARQFFEFIWLLYYAEYFVYVFI

SEQ ID NO: 141 - DNA, 951 bp, synthetic construct
  source 1..951: mol_type = other DNA
attgaaggttcaccacattgtgaatctgttaactcaatcgcaactaaaattttgaactttggtcatacatgttggaaattgcaaagaccatacgttgttaagggtatgatttctattgctgctggtttatttggtaaagaattgtttaataacagacatttgttttcttggggtttgatgtggaaagcaactttcgcattagttccaatcttgtcttttaatttctttgctgcatgtatgaaccaaatatatgatgttgatattgatagaattaataagccagatttgccattggtttctggtgaaatgtcaatcgaaactgcttggattttatctatcatcgttgcattgactggtttgatcgttacaatttggttaaaatcagctccattgttcgttggtatatatatcttcggtatcttcgctggttttgcatactctgttccaccaattagatggaagcaatacccttttactaatttcttgatcacaatttcttcacatgttggtttggcttttacttcttactcagctactacatctgcattaggtttgccatttgtttggaggccagctttttcttttattatcgcttttatgactgttatgggtatgacaatcgctttcgcaaaggatatctctgatattgaaggtgacgctaaatacggtgtttcaactgttgctacaaaattgggtgcaagaaacatgactttcgttgtttctggtgttttgttgttgaactatttggtttctatctcaatcggtattatttggccacaagtttttaaatctaacatcatgatcttgtcacatgctatcttggcattctgtttgatcttccaaacaagagaattagctttggcaaattatgcttctgcaccatcaagacaatttttcgagtttatttggttgttgtactacgctgaatattttgtttacgtttttatttga

SEQ ID NO: 142 - protein, 316 aa, synthetic construct
IEGSPHCESVNSIATKILNFGHTCWKLQRPYVVKGMISIAAGLFGKELFNNRHLFSWGLMWKATFALVPILSFNFFAACMNQIYDVDIDRINKPDLPLVSGEMSIETAWILSIIVALTGLIVTIWLKSAPLFVGIYIFGIFAGFAYSVPPIRWKQYPFTNFLITISSHVGLAFTSYSATTSALGLPFVWRPAFSFIIAFMTVMGMTIAFAKDISDIEGDAKYGVSTVATKLGARNMTFVVSGVLLLNYLVSISIGIIWPQVFKSNIMILSHAILAFCLIFQTRELALANYASAPSRQFFEFIWLLYYAEYFVYVFI

SEQ ID NO: 143 - DNA, 951 bp, synthetic construct
  source 1..951: mol_type = other DNA
attgaaggttcaccacattgtgaatctgttaactcaatcgcaactaaaattttgaactttggtcatacatgttggaaattgcaaagaccatacgttgttaagggtatgatttctattgcttgtggtttatttggtagagaattgtttaataacagacatttgttttcttggggtttgatgtggaaagcatttttcgcattagttccaatcttgtcttttaatttctttgctgcatgtatgaaccaaatatatgatgttgatattgatagaattaataagccagatttgccattggtttctggtgaaatgtcaatcgaaactgcttggattttatctatcatcgttgcattgactggtttgatcgttacaattaaattaaaatcagctccattgttcgttggtatatatatcttcggtatcttcgctggttttgcatactctgttccaccaattagatggaagcaatacccttttactaacttcttgatcacaatttcttcacatgttggtttggcttttactacttacgctgctactagatctgcattaggtttgccatttgtttggtctccagctttttcttttattatcgcttttatgactgttatgtctatgacaatcgctttcgcaaaggatatctctgatattgaaggtgacgctaaatacggtgtttcaactgttgctacaaaattgggtgcaagaaacatgactttcgttgtttctggtgttttgttgttgaactatttggtttctatctcaatcggtattatttggccacaagtttttaaatctaacatcatgatcttgtcacatgctatcttggcattctgtttgatcttccaaacaagagaattagctttggcaaattatgcttctgcaccatcaagacaatttttcgagtttatttggttgttgtactacgctgaatattttgtttacgtttttatttga

SEQ ID NO: 144 - protein, 316 aa, synthetic construct
IEGSPHCESVNSIATKILNFGHTCWKLQRPYVVKGMISIACGLFGRELFNNRHLFSWGLMWKAFFALVPILSFNFFAACMNQIYDVDIDRINKPDLPLVSGEMSIETAWILSIIVALTGLIVTIKLKSAPLFVGIYIFGIFAGFAYSVPPIRWKQYPFTNFLITISSHVGLAFTTYAATRSALGLPFVWSPAFSFIIAFMTVMSMTIAFAKDISDIEGDAKYGVSTVATKLGARNMTFVVSGVLLLNYLVSISIGIIWPQVFKSNIMILSHAILAFCLIFQTRELALANYASAPSRQFFEFIWLLYYAEYFVYVFI

SEQ ID NO: 145 - DNA, 951 bp, synthetic construct
  source 1..951: mol_type = other DNA
attgaaggttcaggtcattgtgaatctgttaactcaatcgcaactaaaattttgaactttggtcatacatgttggaaattgcaaagaccatacgttgttaagggtatgatttctattgcttgtggtttatttggtagagaattgtttaataacagacatttgttttcttggggtttgatgtggaaagcatttttcgcattagttccaatcttgtcttttaatttctttgctgcaatcatgaaccaaatatatgatgttgatattgatagaattaataagccagatttgccattggtttctggtgaaatgtcaatcgaaactgcttggattttatctatcatcgttgcattgactggtttgatcgttacaattaaattaaaatcagctccattgttcgtttttatatatatcttcggtatcttcgctggttttgcatactctgttccaccaattagatggaagcaatacccttttactaatttcttgatcacaatttcttcacatgttggtttggcttttacttcttactcagctactagatctgcattaggtttgccatttgtttggaggccagctttttcttttattatcgcttttatgactgttatgtctatgacaatcgctttcgcaaaggatatttctgatattgaaggtgacgctaaatacggtgtttcaactgttgctacaaaattgggtgcaagaaacatgactttcgttgtttttggtgttttgttgttgaactatttggtttctatctcaatcggtattatttggccacaagtttttaaatctaacatcatgatcttgtcacatgctatcttggcattctgtttgatcttccaaacaagagaattagctttggcaaattatgcttctgcaccatcaagacaatttttcgagtttatttggttgttgtactacgctgaatattttgtttacgtttttatttga

SEQ ID NO: 146 - protein, 316 aa, synthetic construct
IEGSGHCESVNSIATKILNFGHTCWKLQRPYVVKGMISIACGLFGRELFNNRHLFSWGLMWKAFFALVPILSFNFFAAIMNQIYDVDIDRINKPDLPLVSGEMSIETAWILSIIVALTGLIVTIKLKSAPLFVFIYIFGIFAGFAYSVPPIRWKQYPFTNFLITISSHVGLAFTSYSATRSALGLPFVWRPAFSFIIAFMTVMSMTIAFAKDISDIEGDAKYGVSTVATKLGARNMTFVVFGVLLLNYLVSISIGIIWPQVFKSNIMILSHAILAFCLIFQTRELALANYASAPSRQFFEFIWLLYYAEYFVYVFI

SEQ ID NO: 147 - DNA, 951 bp, synthetic construct
  source 1..951: mol_type = other DNA
attgaaggttcaccacatcatgaatctgttaactcaatcgcaactaaaattttgaactttggtcatacatgttggaaattgcaaagaccatacgttgttaagggtatgatttctattgcttctggtttatttggtagagaattgtttaataacagacatttgttttcttggggtttgatgtggaaagcaactttcgcattagttccaatcttgtcttttaatttctttgctgcatgtatgaaccaaatatatgatgttgatattgatagaattaataagccagatttgccattggtttctggtgaaatgtcaatcgaaactgcttggattttatctatcatcgttgcattgactggtttgatcgttacaattaaattaaaatcagctccattgttcgtttttatatatatcttcggtatcttcgctggttttgcatactctgttccaccaattagattgaagcaatacccttttactaatttcttgatcacaatttcttcacatgttggtttggcttttactacttactcagctactagatctgcattaggtttgccatttgtttggaggccagctttttcttttattatcgcttttatgactgttatgtctatgacaatcgctttcgcaaaggatatctctgatattgaaggtgacgctaaatacggtgtttcaactgttgctacaaaattgggtgcaagaaacatgactttcgttgtttctggtgttttgttgttgaactatgctgtttctatctcaatcggtattatttggccacaagtttttaaatctaacatcatgatcttgtcacatgctatcttggcattcatgttgatcagaagaacaagagaattagctttggcaaattatgaatctgcaccagctagacaatttttcgagtttatttggctgttgtaccatgaggtctcctttgtttacgtttttatttga

SEQ ID NO: 148 - protein, 316 aa, synthetic construct
IEGSPHHESVNSIATKILNFGHTCWKLQRPYVVKGMISIASGLFGRELFNNRHLFSWGLMWKATFALVPILSFNFFAACMNQIYDVDIDRINKPDLPLVSGEMSIETAWILSIIVALTGLIVTIKLKSAPLFVFIYIFGIFAGFAYSVPPIRLKQYPFTNFLITISSHVGLAFTTYSATRSALGLPFVWRPAFSFIIAFMTVMSMTIAFAKDISDIEGDAKYGVSTVATKLGARNMTFVVSGVLLLNYAVSISIGIIWPQVFKSNIMILSHAILAFMLIRRTRELALANYESAPARQFFEFIWLLYHEVSFVYVFI

SEQ ID NO: 149 - DNA, 951 bp, synthetic construct
  source 1..951: mol_type = other DNA
attgaaggttcaggtcattgtgaatctgataactcaatcgcaactaaaattttgaactttggtcatacatgttggaaattgcaaagaccatacgttgttaagggtatgatttctattgctgctggtttatttggtagagaattgtttaataacagacatttgttttcttggggtttgatgtggaaagcaactttcgcattagttccaatcttgtcttttaatttctttgctgcagctatgaaccaaatatatgatgttgatattgatagaattaataagccagatttgccattggtttctggtgaaatgtcaatcgaaactgcttggattttatctaacatcgttgcattgactggtttgatcgttacaattaaattaaaatcagctccattgttcgtttttatatatatcttcggtatcttcgctggttttgcatactctgttccaccaattagattgaagcaatacccttttactaatttcttgatcacaatttcttcacatgttggtttggcttttactgtttactcagctactagatctgcattaggtttgccatttgtttggaggccagcttttttgtttattaccgcttttatgactgttatgtctatgacaatcgctttcgcaaaggatatctctgatattgaaggtgacgctaaatacggtgtttcaactgttgctacaaaattgggtgcaagaaacatgactttcgttgtttctggtgttttgttgttgaactatttggtttctatctcaatcggtattatttggccacaagtttttaaatctaacatcatgatcttgtcacatgctatcttggcattctgtttgatcttccaaacaagagaattagctttggcaaattatgcttctgcaccatcaagacaatttttcgagtttatttggttgttgtactacgctgaatattttgtttacgtttttatttga

SEQ ID NO: 150 - protein, 316 aa, synthetic construct
IEGSGHCESDNSIATKILNFGHTCWKLQRPYVVKGMISIAAGLFGRELFNNRHLFSWGLMWKATFALVPILSFNFFAAAMNQIYDVDIDRINKPDLPLVSGEMSIETAWILSNIVALTGLIVTIKLKSAPLFVFIYIFGIFAGFAYSVPPIRLKQYPFTNFLITISSHVGLAFTVYSATRSALGLPFVWRPAFLFITAFMTVMSMTIAFAKDISDIEGDAKYGVSTVATKLGARNMTFVVSGVLLLNYLVSISIGIIWPQVFKSNIMILSHAILAFCLIFQTRELALANYASAPSRQFFEFIWLLYYAEYFVYVFI

SEQ ID NO: 151 - DNA, 951 bp, synthetic construct
  source 1..951: mol_type = other DNA
attgaaggttcaggtcattgtgaatctgttaactcaatcgcaactaaaattttgaactttggtcatacatgttggaaattgcaaagaccatacgttgttaagggtatgatttctattgcttgtggtttatttggtagagaattgtttaataacagacatttgttttcttggggtttgatgtggaaagcaactttcgcattagttccaatcttgtcttttaatttctttgctgcaatcatgaaccaaatatatgatgttgatattgatagaattaataagccagatttgccattggtttctggtgaaatgtcaatcgaaactgcttggattttatctatcatcgttgcattgactggtttgatcgttacaattaaattaaaatcagctccattgttcgtttttatatatatcttcggtatcttcgctggttttgcatactctgttccaccaattagattgaagcaatacccttttactaatttcttgatcacaatttcttcacatgttggtttggcttttactgtttactcagctactacatctgcattaggtttgccatttgcttggtctccagctttttcttttattatcgcttttatgactgttatgggtatgacaatcgctttcgcaaaggatatctctgatattgaaggtgacgctaaatacggtgtttcaactgttgctacaaaattgggtgcaagaaacatgactttcgttgtttctggtgttttgttgttgaactatttggtttctatctcaatcggtattatttggccacaagtttttaaatctaacatcatgatcttgtcacatgctatcttggcattctgtttgatcttccaaacaagagaattagctttggcaaattatgcttctgcaccatcaagacaatttttcgagtttatttggttgttgtactacgctgaatattttgtttacgtttttatttga

SEQ ID NO: 152 - protein, 316 aa, synthetic construct
IEGSGHCESVNSIATKILNFGHTCWKLQRPYVVKGMISIACGLFGRELFNNRHLFSWGLMWKATFALVPILSFNFFAAIMNQIYDVDIDRINKPDLPLVSGEMSIETAWILSIIVALTGLIVTIKLKSAPLFVFIYIFGIFAGFAYSVPPIRLKQYPFTNFLITISSHVGLAFTVYSATTSALGLPFAWSPAFSFIIAFMTVMGMTIAFAKDISDIEGDAKYGVSTVATKLGARNMTFVVSGVLLLNYLVSISIGIIWPQVFKSNIMILSHAILAFCLIFQTRELALANYASAPSRQFFEFIWLLYYAEYFVYVFI

SEQ ID NO: 153 - DNA, 951 bp, synthetic construct
  source 1..951: mol_type = other DNA
attgaaggttcaccacattgtgaatctgataactcaatcgcaactaaaattttgaactttggtcatacatgttggaaattgcaaagaccatacgttgttaagggtatgatttctattgcttgtggtttatttggtaaagaattgtttaataacagacatttgttttcttggggtttgatgtggaaagcatttttcgcattagttccaatcttgtcttttaatttctttgctgcatgtatgaaccaaatatatgatgttgatattgatagaattaataagccagatttgccattggtttctggtgaaatgtcaatcgaaactgcttggattttatctatcatcgttgcattgactggtttgatcgttacaatttggttaaaatcagctccattgttcgttggtatatatatcttcggtatcttcgctggttttgcatactctgttccaccaattagatggaagcaatacccttttactaatttcttgatcacaatttcttcacatgttggtttggcttttacttcttccgctgctactagatctgcattaggtttgccatttgtttggaggccagctttttcttttattatcgcttttatgactgttatgtctatgacaatcgctttcgcaaaggatatctctgatattgaaggtgacgctaaatacggtgtctcaactgttgctacaaaattgggtgcaagaaacatgactttcgttgtttctggtgttttgttgttgaactatttggtttctatctcaatcggtattatttggccacaagtttttaaatctaacatcatgatcttgtcacatgctatcttggcattcgctccaatcggacgcccaagagaattagctttggcaaattatgcttctgcaccatcaagacaatttttcgagtttatttggttgttgtactacgctgaatattttgtttacgtttttatttga

SEQ ID NO: 154 - protein, 316 aa, synthetic construct
IEGSPHCESDNSIATKILNFGHTCWKLQRPYVVKGMISIACGLFGKELFNNRHLFSWGLMWKAFFALVPILSFNFFAACMNQIYDVDIDRINKPDLPLVSGEMSIETAWILSIIVALTGLIVTIWLKSAPLFVGIYIFGIFAGFAYSVPPIRWKQYPFTNFLITISSHVGLAFTSSAATRSALGLPFVWRPAFSFIIAFMTVMSMTIAFAKDISDIEGDAKYGVSTVATKLGARNMTFVVSGVLLLNYLVSISIGIIWPQVFKSNIMILSHAILAFAPIGRPRELALANYASAPSRQFFEFIWLLYYAEYFVYVFI

SEQ ID NO: 155 - DNA, 951 bp, synthetic construct
  source 1..951: mol_type = other DNA
attgaaggttcaccacattgtgaatctgataactcaatcgcaactaaaattttgaactttggtcatacatgttggaaattgcaaagaccatacgttgttaagggtatgatttctattgcttctggtttatttggtaaagaattgtttaataacagacatttgttttcttggggtttgatgtggaaagcatttttcgcattagttccaatcttgtcttttaatttctttgctgcatgtatgaaccaaatatatgatgttgatattgatagaattaataagccagatttgccattggtttctggtgaaatgtcaatcgaaactgcttggattttatctatcatcgttgcattgactggtttgatcgttacaatttggttaaaatcagctccattgttcgtttttatatatatcttcggtatcttcgctggttttgcatactctgttccaccaattagatggaagcaatacccttttactaatttcttgatcacaatttcttcacatgttggtttggcttttactacttacactgctactagatctgcattaggtttgccatttgtttggtctccagctttttcttttattatcgcttttatgactgttatgtctatgacaatcgctttcgcaaaggatatctctgatattgaaggtgacgctaaatacggtgtttcaactgttgctacaaaattgggtgcaagaaacatgactttcgttgtttctggtgttttgttgttgaactatttggttgctatctcaatcggtattatttggccacaagtttttaaatctaacatcatgatcttgtcacatgctatcttggcattcatgttgatcttcagaacaagagaattagctttggcaaattatgaatctgcaccatcaagacaatttttcgagtttatttggttgttgtactacgctgaatattttgtttacgtttttatttga

SEQ ID NO: 156 - protein, 316 aa, synthetic construct
IEGSPHCESDNSIATKILNFGHTCWKLQRPYVVKGMISIASGLFGKELFNNRHLFSWGLMWKAFFALVPILSFNFFAACMNQIYDVDIDRINKPDLPLVSGEMSIETAWILSIIVALTGLIVTIWLKSAPLFVFIYIFGIFAGFAYSVPPIRWKQYPFTNFLITISSHVGLAFTTYTATRSALGLPFVWSPAFSFIIAFMTVMSMTIAFAKDISDIEGDAKYGVSTVATKLGARNMTFVVSGVLLLNYLVAISIGIIWPQVFKSNIMILSHAILAFMLIFRTRELALANYESAPSRQFFEFIWLLYYAEYFVYVFI

SEQ ID NO: 157 - DNA, 951 bp, synthetic construct
  source 1..951: mol_type = other DNA
attgaaggttcaggtcatcatgaatctgataactcaatcgcaactaaaattttgaactttggtcatacatgttggaaattgcaaagaccatacgttgttaagggtatgatttctattgctgctggtttatttggtagagaattgtttaataacagacatttgttttcttggggtttgatgtggaaagcatttttcgcattagttccaatcttgtcttttaatttctttgctgcaatcatgaaccaaatatatgatgttgatattgatagaattaataagccagatttgccattggtttctggtgaaatgtcaatcgaaactgcttggattttatctatcatcgttgcattgactggtttgatcgttacaatttggttaaaatcagctccattgttcgtttttatatatatcttcggtatcttcgctggttttgcatactctgttccaccaattagattgaagcaatacccttttactaatttcttgatcacaatttcttcacatgttggtttggcttttactacttacgctgctactagatctgcattaggtttgccatttgtttggaggccagctttttcttttattatcgcttttatgactgttatgggtatgacaatcgctttcgcaaaggatatctctgatattgaaggtgacgctaaatacggtgtttcaactgttgctacaaaattgggtgcaagaaacatgactttcgttgtttctggtgttttgttgttgaactatttggtttctatctcaatcggtattatttggccacaagtttttaaatctaacatcatgatcttgtcacatgctatcttggcattctgtttgatcttccaaacaagagaattagctttggcaaattatgcttctgcaccatcaagacaatttttcgagtttatttggttgttgtactacgctgaatattttgtttacgtttttatttga

SEQ ID NO: 158 - protein, 316 aa, synthetic construct
IEGSGHHESDNSIATKILNFGHTCWKLQRPYVVKGMISIAAGLFGRELFNNRHLFSWGLMWKAFFALVPILSFNFFAAIMNQIYDVDIDRINKPDLPLVSGEMSIETAWILSIIVALTGLIVTIWLKSAPLFVFIYIFGIFAGFAYSVPPIRLKQYPFTNFLITISSHVGLAFTTYAATRSALGLPFVWRPAFSFIIAFMTVMGMTIAFAKDISDIEGDAKYGVSTVATKLGARNMTFVVSGVLLLNYLVSISIGIIWPQVFKSNIMILSHAILAFCLIFQTRELALANYASAPSRQFFEFIWLLYYAEYFVYVFI

SEQ ID NO: 159 - DNA, 951 bp, synthetic construct
  source 1..951: mol_type = other DNA
attgaaggttcaccacattgtgaatctgataactcaatcgcaactaaaattttgaactttggtcatacatgttggaaattgcaaagaccatacgttgttaagggtatgatttctattgcttgtggtttatttggtagagaattgtttaataacagacatttgttttcttggggtttgatgtggaaagcatttttcgcattagttccaatcttgtcttttaatttctttgctgcaatcatgaaccaaatatatgatgttgatattgatagaattaataagccagatttgccattggtttctggtgaaatgtcaatcgaaactgcttggattttatctatcatcgttgcattgactggtttgatcgttacaattaaattaaaatcagctccattgttcgtttttatatatatcttcggtatcttcgctggttttgcatactctgttccaccaattagatggaagcaatacccttttactaatttcttgatcacaatttcttcacatgttggtttggcttttacttcttacactgctactagatctgcattaggtttgccatttgtttggaggccagcttttgtttttattatcgcttttatgactgttatggctatgacaatcgctttcgcaaaggatatctctgatattgaaggtgacgctaaatacggtgtttcaactgttgctacaaaattgggtgcaagaaacatgactttcgttgtttctggtgttttgttgttgaactatttggtttctatctcaatcggtattatttggccacaagtttttaaatctaacatcatgatcttgtcacatgctatcttggcattctgtttgatcttccaaacaagagaattagctttggcaaattatgcttctgcaccagctagacaatttttcgagtttatttggttgttgtactacgctgaatattttgtttacgtttttatttga

SEQ ID NO: 160 - protein, 316 aa, synthetic construct
IEGSPHCESDNSIATKILNFGHTCWKLQRPYVVKGMISIACGLFGRELFNNRHLFSWGLMWKAFFALVPILSFNFFAAIMNQIYDVDIDRINKPDLPLVSGEMSIETAWILSIIVALTGLIVTIKLKSAPLFVFIYIFGIFAGFAYSVPPIRWKQYPFTNFLITISSHVGLAFTSYTATRSALGLPFVWRPAFVFIIAFMTVMAMTIAFAKDISDIEGDAKYGVSTVATKLGARNMTFVVSGVLLLNYLVSISIGIIWPQVFKSNIMILSHAILAFCLIFQTRELALANYASAPARQFFEFIWLLYYAEYFVYVFI

SEQ ID NO: 161 - DNA, 951 bp, synthetic construct
  source 1..951: mol_type = other DNA
attgaaggttcaggtcattgtgaatctgataactcaatcgcaactaaaattttgaactttggtcatacatgttggaaattgcaaagaccatacgttgttaagggtatgatttctattgctgctggtttatttggtagagaattgtttaataacagacatttgttttcttggggtttgatgtggaaagcaactttcgcattagttccaatcttgtcttttaatttctttgctgcaatcatgaaccaaatatatgatgttgatattgatagaattaataagccagatttgccattggtttctggtgaaatgtcaatcgaaactgcttggattttatctatcatcgttgcattgactggtttgatcgttacaatttggttaaaatcagctccattgttcgttggtatatatatcttcggtatcttcgctggttttgcatactctgttccaccaattagatggaagcaatacccttttactaatttcttgatcacaatttcttcacatgttggtttggcttttacttcttacgctgctactacatctgcattaggtttgccatttgtttggaggccagctttttcttttattatcgcttttatgactgttatgtctatgacaatcgctttcgcaaaggatatctctgatattgaaggtgacgctaaatacggtgtttcaactgttgctacaaaattgggtgcaagaaacatgactttcgttgtttctggtgttttgttgttgaactatttggtttctatctcaatcggtattatttggccacaagtttttaaatctaacatcatgatcttgtcacatgctatcttggcattcgctttgatcagacaaacaagagaattagctttggcaaattatgcttctgcaccatcaagacaatttttcgagtctatttggttgttgtactacgctgaatatttcgtttacgtttttatttga

SEQ ID NO: 162 - protein, 316 aa, synthetic construct
IEGSGHCESDNSIATKILNFGHTCWKLQRPYVVKGMISIAAGLFGRELFNNRHLFSWGLMWKATFALVPILSFNFFAAIMNQIYDVDIDRINKPDLPLVSGEMSIETAWILSIIVALTGLIVTIWLKSAPLFVGIYIFGIFAGFAYSVPPIRWKQYPFTNFLITISSHVGLAFTSYAATTSALGLPFVWRPAFSFIIAFMTVMSMTIAFAKDISDIEGDAKYGVSTVATKLGARNMTFVVSGVLLLNYLVSISIGIIWPQVFKSNIMILSHAILAFALIRQTRELALANYASAPSRQFFESIWLLYYAEYFVYVFI

SEQ ID NO: 163 - DNA, 951 bp, synthetic construct
  source 1..951: mol_type = other DNA
attgaaggttcaccacatcatgaatctgttaactcaatcgcaactaaaattttgaactttggtcatacatgttggaaattgcaaagaccatacgttgttaagggtatgatttctattgcttctggtttatttggtaaagaattgtttaataacagacatttgttttcttggggtttgatgtggaaagcatttttcgcattagttccaatcttgtcttttaatttctttgctgcaatcatgaaccaaatatatgatgttgatattgatagaattaataagccagatttgccattggtttctggtgaaatgtcaatcgaaactgcttggattttatctatcatcgttgcattgactggtttgatcgttacaattaaattaaaatcagctccattgttcgttggtatatatatcttcggtatcttcgctggttttgcatactctgttccaccaattagattgaagcaatacccttttactaatttcttgatcacaatttcttcacatgttggtttggcttttacttcttacactgctactagatctgcattaggtttgccatttgcttggtctccagctttttcttttattatcgcttttatgactgttatgggtggtacaatcgctttcgcaaaggatatctctgatattgaaggtgacgctaaatacggtgtttcaactgttgctacaaaattgggtgcaagaaacatgactttcgttgtttctggtgttttgttgttgaactatgctgtttctatctcaatcggtattatttggccacaagtttttaaatctaacatcatgatcttgtcacatgctatcttggcattcatgttgatcagacaaacaagagaattagctttggcaaattatgcttctgcaccatcaagacaatttttcgagtttatttggttgttgtactacgctgaatattttgtttacgtttttatttga

SEQ ID NO: 164 - protein, 316 aa, synthetic construct
IEGSPHHESVNSIATKILNFGHTCWKLQRPYVVKGMISIASGLFGKELFNNRHLFSWGLMWKAFFALVPILSFNFFAAIMNQIYDVDIDRINKPDLPLVSGEMSIETAWILSIIVALTGLIVTIKLKSAPLFVGIYIFGIFAGFAYSVPPIRLKQYPFTNFLITISSHVGLAFTSYTATRSALGLPFAWSPAFSFIIAFMTVMGGTIAFAKDISDIEGDAKYGVSTVATKLGARNMTFVVSGVLLLNYAVSISIGIIWPQVFKSNIMILSHAILAFMLIRQTRELALANYASAPSRQFFEFIWLLYYAEYFVYVFI

SEQ ID NO: 165 - DNA, 951 bp, synthetic construct
  source 1..951: mol_type = other DNA
attgaaggttcaggtcattgtgaatctgttaactcaatcgcaactaaaattttgaactttggtcatacatgttggaaattgcaaagaccatacgttgttaagggtatgatttctattgcttgtggtttatttggtagagaattgttgaataacccacatttgttttcttggggtttgatgtggaaagcatttttcgcattagttccaatcttgtcttttaatttctttgctgcaatcatgaaccaaatatatgatgttgatattgatagaattaataagccagatttgccattggtttctggtgaaatgtcaatcgaaactgcttggattttatctatcatcgttgcattgactggtttgatcgttacaatttggttaaaatcagctccattgttcgtttttatatatatcttcggtatcttcgctggttttgcatactctgttccaccaattagattgaagcaatacccttttactaatttcttgatcacaatttcttcacatgttggtttggcttttactgtttacactgctactagatctgcattaggtttgccatttgtttggaggccagcttttttgtttattatcgcttttatgactgttatgtctggtacaatcgctttcgcaaaggatatctctgatattgaaggtgacgctaaatacggtgtttcaactgttgctacaaaattgggtgcaagaaacatgactttcgttgtttctggtgttttgttgttgaactatttggtttctatctcaatcggtattatttggccacaagtttttaaatctaacatcatgatcttgtcacatgctatcttggcattctgtttgatcttccaaacaagagaattagctttggcaaattatgcttctgcaccatcaagacaatttttcgagtttatttggttgttgtactacgctgaatattttgtttacgtttttatttga

SEQ ID NO: 166 - protein, 316 aa, synthetic construct
IEGSGHCESVNSIATKILNFGHTCWKLQRPYVVKGMISIACGLFGRELLNNPHLFSWGLMWKAFFALVPILSFNFFAAIMNQIYDVDIDRINKPDLPLVSGEMSIETAWILSIIVALTGLIVTIWLKSAPLFVFIYIFGIFAGFAYSVPPIRLKQYPFTNFLITISSHVGLAFTVYTATRSALGLPFVWRPAFLFIIAFMTVMSGTIAFAKDISDIEGDAKYGVSTVATKLGARNMTFVVSGVLLLNYLVSISIGIIWPQVFKSNIMILSHAILAFCLIFQTRELALANYASAPSRQFFEFIWLLYYAEYFVYVFI

SEQ ID NO: 167 - DNA, 951 bp, synthetic construct
  source 1..951: mol_type = other DNA
attgaaggttcaccacattgtgaatctgttaactcaatcgcaactaaaattttgaactttggtcatacatgttggaaattgcaaagaccatacgttgttaagggtatgatttctattgctgctggtttatttggtaaagaattgtttaataacccacatttgttttcttggggtttgatgtggaaagcatttttcgcattagttccaatcttgtcttttaatttctttgctgcaatcatgaaccaaatatatgatgttgatattgatagaattaataagccagatttgccattggtttctggtgaaatgtcaatcgaaactgcttggattttatctatcatcgttgcattgactggtttgatcgttacaattaaattaaaatcagctccattgttcgtttttatatatatcttcggtatcttcgctggttttgcatactctgttccaccaattagatggaagcaatacccttttactaatttcttgatcacaatttcttcacatgttggtttggcttttactgtttacgctgctactagatctgcattaggtttgccatttgcttggaggccagctttttcttttattatcgcttttatgactgttatgtctggtacaatcgctttcgcaaaggatatctctgatattgaaggtgacgctaaatacggtgtttcaactgttgctacaaaattgggtgcaagaaacatgactttcgttgtttctggtgttttgttgttgaactatttggtttctatctcaatcggtattatttggccacaagtttttaaatctaacatcatgatcttgtcacatgctatcttggcattctgtttgatcttccaaacaagagaattagctttggcaaattatgcttctgcaccatcaagacaatttttcgagtttatttggttgttgtactacgctgaatattttgtttacgtttttatttga

SEQ ID NO: 168 - protein, 316 aa, synthetic construct
IEGSPHCESVNSIATKILNFGHTCWKLQRPYVVKGMISIAAGLFGKELFNNPHLFSWGLMWKAFFALVPILSFNFFAAIMNQIYDVDIDRINKPDLPLVSGEMSIETAWILSIIVALTGLIVTIKLKSAPLFVFIYIFGIFAGFAYSVPPIRWKQYPFTNFLITISSHVGLAFTVYAATRSALGLPFAWRPAFSFIIAFMTVMSGTIAFAKDISDIEGDAKYGVSTVATKLGARNMTFVVSGVLLLNYLVSISIGIIWPQVFKSNIMILSHAILAFCLIFQTRELALANYASAPSRQFFEFIWLLYYAEYFVYVFI

SEQ ID NO: 169 - DNA, 951 bp, synthetic construct
  source 1..951: mol_type = other DNA
attgaaggttcaggtcattgtgaatctgataactcaatcgcaactaaaattttgaactttggtcatacatgttggaaattgcaaagaccatacgttgttaagggtatgatttctattgcttgtggtttatttggtagagaattgtttaataacagacatttgttttcttggggtttgatgtggaaagcatttttcgcattagttccaatcttgtcttttaatttctttgctgcatgtatgaaccaaatatatgatgttgatattgatagaattaataagccagatttgccattggtttctggtgaaatgtcaatcgaaactgcttggattttatctatcatcgttgcattgactggtttgatcgttacaattaaattaaaatcagctccattgttcgttggtatatatatcttcggtatcttcgctggttttgcatactctgttccaccaattagattgaagcaatacccttttactaatttcttgatcacaatttcttcacatgttggtttggcttttactgtttactcagctactacatctgcattaggtttgccatttgtttggaggccagctttttcttttattatcgcttttatgactgttatgggtatgacaatcgctttcgcaaaggatatctctgatattgaaggtgacgctaaatacggtgtttcaactgttgctacaaaattgggtgcaagaaacatgactttcgttgtttctggtgttttgttgttgaactatttggtttctatctcaatcggtattatttggccacaagtttttaaatctaacatcatgatcttgtcacatgctatcttggcattctgtttgatcttccaaacaagagaattagctttggcaaattatgcttctgcaccatcaagacaatttttcgagtttatttggttgttgtactacgctgaatattttgtttacgtttttatttga

SEQ ID NO: 170 - protein, 316 aa, synthetic construct
IEGSGHCESDNSIATKILNFGHTCWKLQRPYVVKGMISIACGLFGRELFNNRHLFSWGLMWKAFFALVPILSFNFFAACMNQIYDVDIDRINKPDLPLVSGEMSIETAWILSIIVALTGLIVTIKLKSAPLFVGIYIFGIFAGFAYSVPPIRLKQYPFTNFLITISSHVGLAFTVYSATTSALGLPFVWRPAFSFIIAFMTVMGMTIAFAKDISDIEGDAKYGVSTVATKLGARNMTFVVSGVLLLNYLVSISIGIIWPQVFKSNIMILSHAILAFCLIFQTRELALANYASAPSRQFFEFIWLLYYAEYFVYVFI

SEQ ID NO: 171 - DNA, 951 bp, synthetic construct
  source 1..951: mol_type = other DNA
attgaaggttcaccacatcatgaatctgttaactcaatcgcaactaaaattttgaactttggtcatacatgttggaaattgcaaagaccatacgttgttaagggtatgatttctattgcttctggtttatttggtaaagaattgtttaataacagacatttgttttcttggggtttgatgtggaaagcatttttcgcattagttccaatcttgtcttttaatttctttgctgcaatcatgaaccaaatatatgatgttgatattgatagaattaataagccagatttgccattggtttctggtgaaatgtcaatcgaaactgcttggattttatctatcatcgttgcattgactggtttgatcgttacaattaaattaaaatcagctccattgttcgttggtatatatatcttcggtatcttcgctggttttgcatactctgttccaccaattagattgaagcaatacccttttactaatttcttgatcacaatttcttcacatgttggtttggcttttactgtttactcagctactacatctgcattaggtttgccatttgtttggaggccagctttttcttttattatcgcttttatgactgttatgtctatgacaatcgctttcgcaaaggatatctctgatattgaaggtgacgctaaatacggtgtttcaactgttgctacaaaattgggtgcaagaaacatgactttcgttgtttctggtgttttgttgttgaactatttggtttctatctcaatcggtattatttggccacaagtttttaaatctaacatcatgatcttgtcacatgctatcttggcattctgtttgatcttccaaacaagagaattagctttggcaaattatgcttctgcaccatcaagacaatttttcgagtttatttggttgttgtactacgctgaatattttgtttacgtttttatttga

SEQ ID NO: 172 - protein, 316 aa, synthetic construct
IEGSPHHESVNSIATKILNFGHTCWKLQRPYVVKGMISIASGLFGKELFNNRHLFSWGLMWKAFFALVPILSFNFFAAIMNQIYDVDIDRINKPDLPLVSGEMSIETAWILSIIVALTGLIVTIKLKSAPLFVGIYIFGIFAGFAYSVPPIRLKQYPFTNFLITISSHVGLAFTVYSATTSALGLPFVWRPAFSFIIAFMTVMSMTIAFAKDISDIEGDAKYGVSTVATKLGARNMTFVVSGVLLLNYLVSISIGIIWPQVFKSNIMILSHAILAFCLIFQTRELALANYASAPSRQFFEFIWLLYYAEYFVYVFI

SEQ ID NO: 173 - DNA, 951 bp, synthetic construct
  source 1..951: mol_type = other DNA
attgaaggttcaccacattgtgaatctgataactcaatcgcaactaaaattttgaactttggtcatacatgttggaaattgcaaagaccatacgttgttaagggtatgatttctattgcttgtggtttatttggtaaagaattgtttaataacagacatttgttttcttggggtttgatgtggaaagcatttttcgcattagttccaatcttgtcttttaatttctttgctgcagctatgaaccaaatatatgatgttgatattgatagaattaataagccagatttgccattggtttctggtgaaatgtcaatcgaaactgcttggattttatctatcatcgttgcattgactggtttgatcgttacaattaaattaaaatcagctccattgttcgtttttatatatatcttcggtatcttcgctggttttgcatactctgttccaccaattagatggaagcaatacccttttactaatttcttgatcacaatttcctcacatgttggtttggcttttacttcttacgctgctactagatctgcattaggtttgccatttgcttggaggccagctttttcttttattatcgcttttatgactgttatgtctatgacaatcgctttcgcaaaggatatctctgatattgaaggtgacgctaaatacggtgtttcaactgttgctacaaaattgggtgcaagaaacatgactttcgttgtttctggtgttttgttgttgaactatttggtttctatctcaatcggtattatttggccacaagtttttaaatctaacatcatgatcttgtcacatgctatcttggcattctgtttgatcttccaaacaagagaattagctttggcaaattatgcttctgcaccatcaagacaatttttcgagtttatttggttgttgtactacgctgaatattttgtttacgtttttatttga

SEQ ID NO: 174 - protein, 316 aa, synthetic construct
IEGSPHCESDNSIATKILNFGHTCWKLQRPYVVKGMISIACGLFGKELFNNRHLFSWGLMWKAFFALVPILSFNFFAAAMNQIYDVDIDRINKPDLPLVSGEMSIETAWILSIIVALTGLIVTIKLKSAPLFVFIYIFGIFAGFAYSVPPIRWKQYPFTNFLITISSHVGLAFTSYAATRSALGLPFAWRPAFSFIIAFMTVMSMTIAFAKDISDIEGDAKYGVSTVATKLGARNMTFVVSGVLLLNYLVSISIGIIWPQVFKSNIMILSHAILAFCLIFQTRELALANYASAPSRQFFEFIWLLYYAEYFVYVFI

SEQ ID NO: 175 - DNA, 951 bp, synthetic construct
  source 1..951: mol_type = other DNA
attgaaggttcaccacattgtgaatctgttaactcaatcgcaactaaaattttgaactttggtcatacatgttggaaattgcaaagaccatacgttgttaagggtatgatttctattgctgctggtttatttggtagagaattgtttaataacagacatttgttttcttggggtttgatgtggaaagcatttttcgcattagttccaatcttgtcttttaatttctttgctgcaatcatgaaccaaatatatgatgttgatattgatagaattaataagccagatttgccattggtttctggtgaaatgtcaatcgaaactgcttggattttatctatcatcgttgcattgactggtttgatcgttacaatttggttaaaatcagctccattgttcgtttttatatatatcttcggtatcttcgctggttttgcatactctgttccaccaattagattgaagcaatacccttttactaatttcttgatcacaatttcttcacatgttggtttggcttttactacttactcagctactacatctgcattaggtttgccattttcttggtctccagctttttcttttattatcgcttttaggacggttatgggtggtacaatcgctttcgcaaaggatatctgtgatattgaaggggtcgctaaatacggtgtttcaactgttgctacaaaattgggtgcaagaaacatgactttcgttgtttctggcgctttgttgttgaactatttggtttgtatctcaatcggtattatttggccacaagtttttaaatataacatcatgatcttgtcacatgctatcttggcattttgtttgatcttccgaacaagagaattagctttgccaaattatgcttctgcaccatcaagacaatttttcgagtttatttggttgttgtactacgctgaatattttgtttacgtttttatttga

SEQ ID NO: 176 - protein, 316 aa, synthetic construct
IEGSPHCESVNSIATKILNFGHTCWKLQRPYVVKGMISIAAGLFGRELFNNRHLFSWGLMWKAFFALVPILSFNFFAAIMNQIYDVDIDRINKPDLPLVSGEMSIETAWILSIIVALTGLIVTIWLKSAPLFVFIYIFGIFAGFAYSVPPIRLKQYPFTNFLITISSHVGLAFTTYSATTSALGLPFSWSPAFSFIIAFRTVMGGTIAFAKDICDIEGVAKYGVSTVATKLGARNMTFVVSGALLLNYLVCISIGIIWPQVFKYNIMILSHAILAFCLIFRTRELALPNYASAPSRQFFEFIWLLYYAEYFVYVFI

SEQ ID NO: 177 - DNA, 951 bp, synthetic construct
  source 1..951: mol_type = other DNA
attgaaggttcaccacattgtgaatctgataactcaatcgcaactaaaattttgaactttggtcatacatgttggaaattgcaaagaccatacgttgttaagggtatgatttctattgcttgtggtttatttggtagagaattgtttaataacagacatttgttttcttggggtttgatgtggaaagcatttttcgcattagttccaatcttgtcttttaatttctttgctgcaatcatgaaccaaatatatgatgttgatattgatagaattaataagccagatttgccattggtttctggtgaaatgtcaatcgaaactgcttggattttatctatcatcgttgcattgactggtttgatcgttacaatttggttaaaatcagctccattgttcgtttttatatatatcttcggtatcttcgctggttttgcatactctgttccaccaattagatggaagcaatacccttttactaatttcttgatcacaatttcttcacatgttggtttggcttttactgtttacactgctactagatctgcattaggtttgccatttgtttggaggccagcttttttgtttattatcgcttttatgactgttatgtctatgacaatcgctttcgcaaaggatatctctgatattgaaggtgacgctaaatacggtgtttcaactgttgctacaaaattgggtgcaagaaacatgactttcgttgtttctggtgttttgttgttgaactatttggttgctatctcaatcggtattatttggccacaagtttttaaatctaacatcatgatcttgtcacatgctatcttggcattctgtttgatcttccaaacaagagaattagctttggcaaattatgcttctgcaccagctagacaatttttcgagtttatttggttgttgtattacgctgaatattttgtttacgtttttatttga

SEQ ID NO: 178 - protein, 316 aa, synthetic construct
IEGSPHCESDNSIATKILNFGHTCWKLQRPYVVKGMISIACGLFGRELFNNRHLFSWGLMWKAFFALVPILSFNFFAAIMNQIYDVDIDRINKPDLPLVSGEMSIETAWILSIIVALTGLIVTIWLKSAPLFVFIYIFGIFAGFAYSVPPIRWKQYPFTNFLITISSHVGLAFTVYTATRSALGLPFVWRPAFLFIIAFMTVMSMTIAFAKDISDIEGDAKYGVSTVATKLGARNMTFVVSGVLLLNYLVAISIGIIWPQVFKSNIMILSHAILAFCLIFQTRELALANYASAPARQFFEFIWLLYYAEYFVYVFI

SEQ ID NO: 179 - DNA, 951 bp, synthetic construct
  source 1..951: mol_type = other DNA
attgaaggttcaccacattgtgaatctgttaactcaatcgcaactaaaattttgaactttggtcatacatgttggaaattgcaaagaccatacgttgttaagggtatgatttctattgctgctggtttatttggtaaagaattgtttaataacagacatttgttttcttggggtttgatgtggaaagcatttttcgcattagatccaatcttgtcttttaatttctttgctgcagctatgaaccaaatatatgatgttgatattgatagaattaataagccagatttgccattggtttctggtgaaatgtcaatcgaaactgcttggattttatctatcatcgttgcattgactggtttgatcgttacaattaaattaaaatcagctccattgttcgtttttatatatatcttcggtatcttcgctggttttgcatactctgttccaccaattagattgaagcaatacccttttactaatttcttgatcacaatttcttcacatgttggtttggcttttactgtttacactgctactagatctgcattaggtttgccatttgcttggtctccagctttttcttttattatcgcttttatgactgttatgtctggtacaatcgctttcgcaaaggatatctctgatattgaaggtgacgctaaatacggtgtttcaactgttgctacaaaattgggtgcaagaaacatgactttcgttgtttctggtgttttgttgttgaactatttggtttctatctcaatcggtattatttggccacaagtttttaaatctaacatcatgatcttgtcacatgctatcttggcattctgtttgatcttccaaacaagagaattagctttggcaaattatgcttctgcaccatcaagacaatttttcgagtttatttggttgttgtactacgctgaatattttgtttacgtttttatttga

SEQ ID NO: 180 - protein, 316 aa, synthetic construct
IEGSPHCESVNSIATKILNFGHTCWKLQRPYVVKGMISIAAGLFGKELFNNRHLFSWGLMWKAFFALDPILSFNFFAAAMNQIYDVDIDRINKPDLPLVSGEMSIETAWILSIIVALTGLIVTIKLKSAPLFVFIYIFGIFAGFAYSVPPIRLKQYPFTNFLITISSHVGLAFTVYTATRSALGLPFAWSPAFSFIIAFMTVMSGTIAFAKDISDIEGDAKYGVSTVATKLGARNMTFVVSGVLLLNYLVSISIGIIWPQVFKSNIMILSHAILAFCLIFQTRELALANYASAPSRQFFEFIWLLYYAEYFVYVFI

SEQ ID NO: 181 - DNA, 951 bp, synthetic construct
  source 1..951: mol_type = other DNA
attgaaggttcaggtcatcatgaatctgataactcaatcgcaactaaaattttgaactttggtcatacatgttggaaattgcaaagaccatacgttgttaagggtatgatttctattgcttgtggtttatttggtaaagaattgtttaataacccacatttgttttcttggggtttgatgtggaaagcaactttcgcattagttccaatcttgtcttttaatttctttgctgcaatcatgaaccaaatatatgatgttgatattgatagaattaataagccagatttgccattggtttctggtgaaatgtcaatcgaaactgcttggattttatctatcatcgttgcattgactggcttgatcgttacaattaaattaaaatcagctccattgttcgtttttatatatatcttcggtatcttcgctggttttgcatactctgttccaccaattagatggaagcaatacccttttactaatttcttgatcacaatttcttcacatgttggtttggcttttacttcttactcagctactacatctgcattaggtttgccatttgtttggaggccagctttttcttttattatcgcttttatgactgttatgggtatgacaatcgctttcgcaaaggatatctctgatattgaaggtgacgctaaatacggtgtttcaactgttgctacaaaattgggtgcaagaaacatgactttcgttgtttctggtgttttgttgttgaactatgctgtttctatctcaatcggtattatttggccacaagtttttaaatctaacatcatgatcttgtcacatgctatcttggcattctgtttgatcttccaaacaagaagattagctttggcaaattatgaatctgcaccagctagacaatttttcgagtttatttggttgttgtactacgctgaatattttgtttacgtttttatttga

SEQ ID NO: 182 - protein, 316 aa, synthetic construct
IEGSGHHESDNSIATKILNFGHTCWKLQRPYVVKGMISIACGLFGKELFNNPHLFSWGLMWKATFALVPILSFNFFAAIMNQIYDVDIDRINKPDLPLVSGEMSIETAWILSIIVALTGLIVTIKLKSAPLFVFIYIFGIFAGFAYSVPPIRWKQYPFTNFLITISSHVGLAFTSYSATTSALGLPFVWRPAFSFIIAFMTVMGMTIAFAKDISDIEGDAKYGVSTVATKLGARNMTFVVSGVLLLNYAVSISIGIIWPQVFKSNIMILSHAILAFCLIFQTRRLALANYESAPARQFFEFIWLLYYAEYFVYVFI

SEQ ID NO: 183 - DNA, 951 bp, synthetic construct
  source 1..951: mol_type = other DNA
attgaaggttcaggtcattgtgaatctgataactcaatcgcaactaaaattttgaactttggtcatacatgttggaaattgcaaagaccatacgttgttaagggtatgatttctattgcttctggtttatttggtaaagaattgtttaataacagacatttgttttcttggggtttgatgtggaaagcatttttcgcattagttccaatcttgtcttttaatttctttgctgcaatcatgaaccaaatatatgatgttgatattgatagaattaataagccagatttgccattggtttctggtgaaatgtcaatcgaaactgcttggattttatctatcatcgttgcattgactggtttgatcgttacaatttggttaaaatcagctccattgttcgttggtatatatatcttcggtatcttcgctggttttgcatactctgttccaccaattagatggaagcaatacccttttactaatttcttgatcacaacttcttcacatgttggtttggcttttactacttacactgctactagatctgcattaggtttgccatttgtttggaggccagctttttcttttattatcgcttttatgactgttatgtctatgacaatcgctttcgcaaaggatatctctgatattgaaggtgacgctaaatacggtgtttcaactgttgctacaaaattgggtgcaagaaacatgactttcgttgtttctggtgttttgttgttgaactatttggtttctatctcaatcggtattatttggccacaagtttttaaatctaacatcatgatcttgtcacatgctatcttggcattctgtttgatcttcagaacaagagaattagctttggcaaattatgcttctgcaccagctagacaatttttcgagtttatttggttgttgtattacgctgaatattttgtttacgtttttatttga

SEQ ID NO: 184 - protein, 316 aa, synthetic construct
IEGSGHCESDNSIATKILNFGHTCWKLQRPYVVKGMISIASGLFGKELFNNRHLFSWGLMWKAFFALVPILSFNFFAAIMNQIYDVDIDRINKPDLPLVSGEMSIETAWILSIIVALTGLIVTIWLKSAPLFVGIYIFGIFAGFAYSVPPIRWKQYPFTNFLITTSSHVGLAFTTYTATRSALGLPFVWRPAFSFIIAFMTVMSMTIAFAKDISDIEGDAKYGVSTVATKLGARNMTFVVSGVLLLNYLVSISIGIIWPQVFKSNIMILSHAILAFCLIFRTRELALANYASAPARQFFEFIWLLYYAEYFVYVFI

SEQ ID NO: 185 - DNA, 951 bp, synthetic construct
  source 1..951: mol_type = other DNA
attgaaggttcaccacattgtgaatctgttaactcaatcgcaactaaaattttgaactttggtcatacatgttggaaattgcaaagaccatacgttgttaagggtatgatttctattgctgctggtttatttggtagagaattgtttaataacagacatttgttttcttggggtttgatgtggaaagcaactttcgcattagttccaatcttgtcttttaatttctttgctgcaatcatgaaccaaatatatgatgttgatattgatagaattaataagccagatttgccattggtttctggtgaaatgtcaatcgaaactgcttggattttatctatcatcgttgcattgactggtttgatcgttacaattaaattaaaatcagctccattgttcgtttttatatatatcttcggtatcttcgctggttttgcatactctgttccaccaattagattgaagcaatacccttttactaatttcttgatcacaatttcttcacatgttggtttggcttttactgtttacgctgctactagatctgcattaggtttgccatttgtttggaggccagctttttcttttattatcgcttttatgactgttatgggtggtacaatcgctttcgcaaaggatatctctgatattgaaggtgacgctaaatacggtgtttcaactgttgctacaaaattgggtgcaagaaacatgactttcgttgtttctggtgttttgttgttgaactatttggtttctatctcaatcggtattatttggccacaagtttttaaatctaacatcatgatcttgtcacatgctatcttggcattctgtttgatcttccaaacaagagaattagctttggcaaattatgcttctgcaccatcaagacaatttttcgagtttatttggttgttgtactacgctgaatattttgtttacgtttttatttga

SEQ ID NO: 186 - protein, 316 aa, synthetic construct
IEGSPHCESVNSIATKILNFGHTCWKLQRPYVVKGMISIAAGLFGRELFNNRHLFSWGLMWKATFALVPILSFNFFAAIMNQIYDVDIDRINKPDLPLVSGEMSIETAWILSIIVALTGLIVTIKLKSAPLFVFIYIFGIFAGFAYSVPPIRLKQYPFTNFLITISSHVGLAFTVYAATRSALGLPFVWRPAFSFIIAFMTVMGGTIAFAKDISDIEGDAKYGVSTVATKLGARNMTFVVSGVLLLNYLVSISIGIIWPQVFKSNIMILSHAILAFCLIFQTRELALANYASAPSRQFFEFIWLLYYAEYFVYVFI

SEQ ID NO: 187 - DNA, 951 bp, synthetic construct
  source 1..951: mol_type = other DNA
attgaaggttcaggtcatcatgaatctgataactcaatcgcaactaaaattttgaactttggtcatacatgttggaaattgcaaagaccatacgttgttaagggtatgatttctattgcttctggtttatttggtagagaattgtttaataacccacatttgttttcttggggtttgatgtggaaagcatttttcgcattagttccaatcttgtcttttaatttctttgctgcatgtatgaaccaaatatatgatgttgatattgatagaattaataagccagatttgccattggtttctggtgaaatgtcaatcgaaactgcttggattttatctatcatcgttgcattgactggtttgatcgttacaattaaattaaaatcagctccattgttcgtttttatatatatcttcggtatcttcgctggttttgcatactctgttccaccaattagatggaagcaatacccttttactaatttcttgatcacaatttcttcacatgttggtttggcttttacttcttactcagctactacatctgcattaggtttgccatttgtttggaggccagctttttcttttattatcgcttttatgactgttatgggtatgacaatcgctttcgcaaaggatatctctgatattgaaggtgacgctaaatacggtgtttcaactgttgctacaaaattgggtgcaagaaacatgactttcgttgtttctggtgttttgttgttgaactatttggtttctatctcaatcggtattatttggccacaagtttttaaatctaacatcatgatcttgtcacatgctatcttggcattctgtttgatcttccaaacaagagaattagctttggcaaattatgcttctgcaccatcaagacaatttttcgagtttatttggttgttgtactacgctgaatattttgtttacgtttttatttga

SEQ ID NO: 188 - protein, 316 aa, synthetic construct
IEGSGHHESDNSIATKILNFGHTCWKLQRPYVVKGMISIASGLFGRELFNNPHLFSWGLMWKAFFALVPILSFNFFAACMNQIYDVDIDRINKPDLPLVSGEMSIETAWILSIIVALTGLIVTIKLKSAPLFVFIYIFGIFAGFAYSVPPIRWKQYPFTNFLITISSHVGLAFTSYSATTSALGLPFVWRPAFSFIIAFMTVMGMTIAFAKDISDIEGDAKYGVSTVATKLGARNMTFVVSGVLLLNYLVSISIGIIWPQVFKSNIMILSHAILAFCLIFQTRELALANYASAPSRQFFEFIWLLYYAEYFVYVFI

SEQ ID NO: 189 - DNA, 951 bp, synthetic construct
  source 1..951: mol_type = other DNA
attgaaggttcaggtcattgtgaatctgataactcaatcgcaactaaaattttgaactttggtcatacatgttggaaattgcaaagaccatacgttgttaagggtatgatttctattgcttgtggtttatttggtagagaattgtttaataacccacatttgttttcttggggtttgatgtggaaagcatttttcgcattagttccaatcttgtcttttaatttctttgctgcagctatgaaccaaatatatgatgttgatattgatagaattaataagccagatttgccattggtttctggtgaaatgtcaatcgaaactgcttggattttatctatcatcgttgcattgactggtttgatcgttacaattaaattaaaatcagctccattgttcgttggtatatatatcttcggtatcttcgctggttttgcatactctgttccaccaattagattgaagcaatacccttttactaatttcttgatcacaatttcttcacatgttggtttggcttttacttcttactcagctactacatctgcattaggtttgccatttgtttggaggccagctttttcttttattatcgcttttatgactgttatgtctggtacaatcgctttcgcaaaggatatctctgatattgaaggtgacgctaaatacggtgtttcaactgttgctacaaaattgggtgcaagaaacatgactttcgttgtttctggtgttttgttgttgaactatgctgtttctatctcaatcggtattatttggccacaagtttttaaatctaacatcatgatcttgtcacatgctatcttggcattcgctttgatcagaagaacaagagaattagctttggcaaattatgaatctgcaccatcaagacaatttttcgagtttatttggttgttgtactacgctgaatattttgtttacgtttttatttga

SEQ ID NO: 190 - protein, 316 aa, synthetic construct
IEGSGHCESDNSIATKILNFGHTCWKLQRPYVVKGMISIACGLFGRELFNNPHLFSWGLMWKAFFALVPILSFNFFAAAMNQIYDVDIDRINKPDLPLVSGEMSIETAWILSIIVALTGLIVTIKLKSAPLFVGIYIFGIFAGFAYSVPPIRLKQYPFTNFLITISSHVGLAFTSYSATTSALGLPFVWRPAFSFIIAFMTVMSGTIAFAKDISDIEGDAKYGVSTVATKLGARNMTFVVSGVLLLNYAVSISIGIIWPQVFKSNIMILSHAILAFALIRRTRELALANYESAPSRQFFEFIWLLYYAEYFVYVFI

SEQ ID NO: 191 - DNA, 951 bp, synthetic construct
  source 1..951: mol_type = other DNA
attgaaggttcaccacatcatgaatctgttaactcaatcgcaactaaaattttgaactttggtcatacatgttggaaattgcaaagaccatacgttgttaagggtatgatttctattgcttgtggtttatttggtaaagaattgtttaataacagacatttgttttcttggggtttgatgtggaaagcatttttcgcattagttccaatcttgtcttttaatttctttgctgcaatcatgaaccaaatatatgatgttgatattgatagaattaataagccagatttgccattggtttctggtgaaatgtcaatcgaaactgcttggattttatctatcatcgttgcattgactggtttgatcgttacaattaaattaaaatcagctccattgttcgtttttatatatatcttcggtatcttcgctggttttgcatactctgttccaccaattagattgaagcaatacccttttactaatttcttgatcacaatttcttcacatgttggtttggcttttacttcttactcagctactagatctgcattaggtttgccatttgtttggaggccagcttttgtttttattatcgcttttatgactgttatgggtatgacaatcgctttcgcaaaggatatctctgatattgaaggtgacgctaaatacggtgtttcaactgttgctacaaaattgggtgcaagaaacatgactttcgttgtttctggtgttttgttgttgaactatgctgtttctatctcaatcggtattatttggccacaagtctttaaatctaacatcatgatcttgtcacatgctatcttggcattcatgttgatcagaagaacaagagaattagctttggcaaattatgaatctgcaccagctagacaatttttcgagtttatttggttgttgtactacgctgaatattttgtttacgtttttatttga

SEQ ID NO: 192 - protein, 316 aa, synthetic construct
IEGSPHHESVNSIATKILNFGHTCWKLQRPYVVKGMISIACGLFGKELFNNRHLFSWGLMWKAFFALVPILSFNFFAAIMNQIYDVDIDRINKPDLPLVSGEMSIETAWILSIIVALTGLIVTIKLKSAPLFVFIYIFGIFAGFAYSVPPIRLKQYPFTNFLITISSHVGLAFTSYSATRSALGLPFVWRPAFVFIIAFMTVMGMTIAFAKDISDIEGDAKYGVSTVATKLGARNMTFVVSGVLLLNYAVSISIGIIWPQVFKSNIMILSHAILAFMLIRRTRELALANYESAPARQFFEFIWLLYYAEYFVYVFI

SEQ ID NO: 193 - DNA, 951 bp, synthetic construct
  source 1..951: mol_type = other DNA
attgaaggttcaccacatcatgaatctgttaactcaatcgcaactaaaattttgaactttggtcatacatgttggaaattgcaaagaccatacgttgttaagggtatgatttctattgcttctggtttatttggtagagaattgtttaataacagacatttgttttcttggggtttgatgtggaaagcatttttcgcattagttccaatcttgtcttttaatttctttgctgcaatcatgaaccaaatatatgatgttgatattgatagaattaataagccagatttgccattggtttctggtgaaatgtcaatcgaaactgcttggattttatctatcatcgttgcattgactggtttgatcgttacaatttggttaaaatcagctccattgttcgttggtatatatatcttcggtatcttcgctggttttgcatactctgttccaccaattagatggaagcaatacccttttactaatttcttgatcacaatttcttcacatgttggtttggcttttactgtttacgctgctactagatctgcattaggtttgccatttgtttggaggccagctttttcttttattatcgcttttatgactgttatgggtatgacaatcgctttcgcaaaggatatctctgatattgaaggtgacgctaaatacggtgtttcaactgttgctacaaaattgggtgcaagaaacatgactttcgttgtttctggtgttttgttgttgaactatttggtttctatctcaatcggtattatttggccacaagtttttaaatctaacatcatgatcttgtcacatgctatcttggcattctgtttgatcttccaaacaagagaattagctttggcaaattatgcttctgcaccatcaagacaatttttcgagtttatttggttgttgtactacgctgaatattttgtttacgtttttatttga

SEQ ID NO: 194 - protein, 316 aa, synthetic construct
IEGSPHHESVNSIATKILNFGHTCWKLQRPYVVKGMISIASGLFGRELFNNRHLFSWGLMWKAFFALVPILSFNFFAAIMNQIYDVDIDRINKPDLPLVSGEMSIETAWILSIIVALTGLIVTIWLKSAPLFVGIYIFGIFAGFAYSVPPIRWKQYPFTNFLITISSHVGLAFTVYAATRSALGLPFVWRPAFSFIIAFMTVMGMTIAFAKDISDIEGDAKYGVSTVATKLGARNMTFVVSGVLLLNYLVSISIGIIWPQVFKSNIMILSHAILAFCLIFQTRELALANYASAPSRQFFEFIWLLYYAEYFVYVFI

SEQ ID NO: 195 - DNA, 951 bp, synthetic construct
  source 1..951: mol_type = other DNA
attgaaggttcaggtcatcatgaatctgttaactcaatcgcaactaaaattttgaactttggtcatacatgttggaaattgcaaagaccatacgttgttaagggtatgatttctattgcttctggtttatttggtagagaattgtttaataacagacatttgttttcttggggtttgatgtggaaagcatttttcgcattagttccaatcttgtcttttaatttctttgctgcaatcatgaaccaaatatatgatgttgatattgatagaattaataagccagatttgccattggtttctggtgaaatgtcaatcgaaactgcttggattttatctatcatcgttgcattgactggtttgatcgttacaatttggttaaaatcagctccattgttcgttggtatatatatcttcggtatcttcgctggttttgcatactctgttccaccaattagatggaagcaatacccttttactaatttcttgatcacaatttcttcacatgttggtttggcttttacttcttactcagctactagatctgcattaggtttgccatttgtttggaggccagctttttcttttattatcgcttttatgactgttatgggtatgacaatcgctttcgcaaaggatatctctgatattgaaggtgacgctaaatacggtgtttcaactgttgctacaaaattgggtgcaagaaacatgactttcgttgtttctggtgttttgttgttgaactatttggtttctatctcaatcggtattatttggccacaagtttttaaatctaacatcatgatcttgtcacatgctatcttggcattctgtttgatcttccaaacaagagaattagctttggcaaattatgcttctgcaccatcaagacaatttttcgagtttatttggttgttgtactacgctgaatattttgtttacgtttttatttga

SEQ ID NO: 196 - protein, 316 aa, synthetic construct
IEGSGHHESVNSIATKILNFGHTCWKLQRPYVVKGMISIASGLFGRELFNNRHLFSWGLMWKAFFALVPILSFNFFAAIMNQIYDVDIDRINKPDLPLVSGEMSIETAWILSIIVALTGLIVTIWLKSAPLFVGIYIFGIFAGFAYSVPPIRWKQYPFTNFLITISSHVGLAFTSYSATRSALGLPFVWRPAFSFIIAFMTVMGMTIAFAKDISDIEGDAKYGVSTVATKLGARNMTFVVSGVLLLNYLVSISIGIIWPQVFKSNIMILSHAILAFCLIFQTRELALANYASAPSRQFFEFIWLLYYAEYFVYVFI

SEQ ID NO: 197 - DNA, 951 bp, synthetic construct
  source 1..951: mol_type = other DNA
attgaaggttcaccacattgtgaatctgataactcaatcgcaactaaaattttgaactttggtcatacatgttggaaattgcaaagaccatacgttgttaagggtatgatttctattgcttgtggtttatttggtagagaattgtttaataacagacatttgttttcttggggtttgatgtggaaagcatttttcgcattagttccaatcttgtcttttaatttctttgctgcagctatgaaccaaatatatgatgttgatattgatagaattaataagccagatttgccattggtttctggtgaaatgtcaatcgaaactgcttggattttatctatcatcgttgcattgactggtttgatcgttacaatttggttaaaatcagctccattgttcgtttttatatatatcttcggtatcttcgctggttttgcatactctgttccaccaattagattgaagcaatacccttttactaatttcttgatcacaatttcttcacatgttggtttggcttttactacttactcagctactagatctgcattaggtttgccatttgtttggtctccagctttttcttttattatcgcttttatgactgttatgggtggtacaatcgctttcgcaaaggatatctctgatattgaaggtgacgctaaatacggtgtttcaactgttgctacaaaattgggtgcaagaaacatgactttcgttgtttctggtgttttgttgttgaactatgctgttgctatctcaatcggtattatttggccacaagtttttaaatctaacatcatgatcttgtcacatgctatcttggcattcgctttgatcagacaaacaagagaattagctttggcaaattatgaatctgcaccatcaagacaatttttcgagtttatttggttgttgtactacgctgaatattttgtttacgtttttatttga

SEQ ID NO: 198 - protein, 316 aa, synthetic construct
IEGSPHCESDNSIATKILNFGHTCWKLQRPYVVKGMISIACGLFGRELFNNRHLFSWGLMWKAFFALVPILSFNFFAAAMNQIYDVDIDRINKPDLPLVSGEMSIETAWILSIIVALTGLIVTIWLKSAPLFVFIYIFGIFAGFAYSVPPIRLKQYPFTNFLITISSHVGLAFTTYSATRSALGLPFVWSPAFSFIIAFMTVMGGTIAFAKDISDIEGDAKYGVSTVATKLGARNMTFVVSGVLLLNYAVAISIGIIWPQVFKSNIMILSHAILAFALIRQTRELALANYESAPSRQFFEFIWLLYYAEYFVYVFI

SEQ ID NO: 199 - DNA, 951 bp, synthetic construct
  source 1..951: mol_type = other DNA
attgaaggttcaggtcattgtgaatctgttaactcaatcgcaactaaaattttgaactttggtcatacatgttggaaattgcaaagaccatacgttgttaagggtatgatttctattgcttctggtttatttggtaaagaattgtttaataacagacatttgttttcttggggtttgatgtggaaagcatttttcgcattagttccaatcttgtcttttaatttctttgctgcaatcatgaaccaaatatatgatgttgatattgatagaattaataagccagatttgccattggtttctggtgaaatgtcaatcgaaactgcttggattttatctatcatcgttgcattgactggtttgaccgttacaatttggttaaaatcagctccattgttcgttggtatatatatcttcggtatcttcgctggttttgcatactctgttccaccaattagattgaagcaatacccttttactaatttcttgatcacaatttcttcacatgttggtttggcttttactgtttacactgctactagatctgcattaggtttgccatttgcttggtctccagctttttcttttattatcgcttttatgactgttatgggtggtacaatcgctttcgcaaaggatatctctgatattgaaggtgacgctaaatacggtgtttcaactgttgctacaaaattgggtgcaagaaacatgactttcgttgtttctggtgttttgttgttgaactatttggtttctatctcaatcggtattatttggccacaagtttttaaatctaacatcatgatcttgtcacatgctatcttggcattctgtttgatcttccaaacaagagaattagctttggcaaattatgcttctgcaccatcaagacaatttttcgagtttatttggttgttgtactacgctgaatattttgtttacgtttttatttga

SEQ ID NO: 200 - protein, 316 aa, synthetic construct
IEGSGHCESVNSIATKILNFGHTCWKLQRPYVVKGMISIASGLFGKELFNNRHLFSWGLMWKAFFALVPILSFNFFAAIMNQIYDVDIDRINKPDLPLVSGEMSIETAWILSIIVALTGLTVTIWLKSAPLFVGIYIFGIFAGFAYSVPPIRLKQYPFTNFLITISSHVGLAFTVYTATRSALGLPFAWSPAFSFIIAFMTVMGGTIAFAKDISDIEGDAKYGVSTVATKLGARNMTFVVSGVLLLNYLVSISIGIIWPQVFKSNIMILSHAILAFCLIFQTRELALANYASAPSRQFFEFIWLLYYAEYFVYVFI

SEQ ID NO: 201 - DNA, 951 bp, synthetic construct
  source 1..951: mol_type = other DNA
attgaaggttcaggtcatcatgaatctgataactcaatcgcaactaaaattttgaactttggtcatacatgttggaaattgcaaagaccatacgttgttaagggtatgatttctattgcttctggtttatttggtagagaattgtttaataacagacatttgttttcttggggtttgatgtggaaagcatttttcgcattagttccaatcttgtcttttaatttctttgctgcaatcatgaaccaaatatatgatgttgatattgatagaattaataagccagatttgccattggtttctggtgaaatgtcaatcgaaactgcttggattttatctatcatcgttgcattgactggtttgatcgttacaattaaattaaaatcagctccattgttcgtttttatatatatcttcggtatcttcgctggttttgcatactctgttccaccaattagatggaagcaatacccttttactaatttcttgatcacaatttcttcacatgttggtttggcttttactgtttacgctgctactagatctgcattaggtttgccatttgtttggaggccagctttttcttttattatcgcttttatgactgttatgggtatgacaatcgctttcgcaaaggatatctctgatattgaaggtgacgctaaatacggtgtttcaactgttgctacaaaattgggtgcaagaaacatgactttcgttgtttctggtgttttgttgttgaactatgctgtttctatctcaatcggtattatttggccacaagtttttaaatctaacatcatgatcttgtcacatgctatcttggcattcgctttgatcttccaaacaagagaattagctttggcaaattatgcttctgcaccatcaagacaatttttcgagtttatttggttgttgtactacgctgaatattttgtttacgtttttatttga

SEQ ID NO: 202 - protein, 316 aa, synthetic construct
IEGSGHHESDNSIATKILNFGHTCWKLQRPYVVKGMISIASGLFGRELFNNRHLFSWGLMWKAFFALVPILSFNFFAAIMNQIYDVDIDRINKPDLPLVSGEMSIETAWILSIIVALTGLIVTIKLKSAPLFVFIYIFGIFAGFAYSVPPIRWKQYPFTNFLITISSHVGLAFTVYAATRSALGLPFVWRPAFSFIIAFMTVMGMTIAFAKDISDIEGDAKYGVSTVATKLGARNMTFVVSGVLLLNYAVSISIGIIWPQVFKSNIMILSHAILAFALIFQTRELALANYASAPSRQFFEFIWLLYYAEYFVYVFI

SEQ ID NO: 203 - DNA, 951 bp, synthetic construct
  source 1..951: mol_type = other DNA
attgaaggttcaccacattgtgaatctgttaactcaatcgcaactaaaattttgaactttggtcatacatgttggaaattgcaaagaccatacgttgttaagggtatgatttctattgcttgtggtttatttggtagagaattgttgaataacagacatttgttttcttggggtttgatgtggaaagcatttttcgcattagttccaatcttgtcttttaatttctttgctgcatgtatgaaccaaatatatgatgttgatattgatagaattaataagccagatttgccattggtttctggtgaaatgtcaatcgaaactgcttggattttatctatcatcgttgcattgactggtttgatcgttacaattaaattaaaatcagctccattgttcgtttttatatatatcttcggtatcttcgctggttttgcatactctgttccaccaattagattgaagcaatacccttttactaatttcttgatcacaatttcttcacatgttggtttggcttttactgtttacactgctactagatctgcattaggtttgccatttgcttggaggccagcttttttgtttattatcgcttttatgactgttatgggtatgacaatcgctttcgcaaaggatatctctgatattgaaggtgacgctaaatacggtgtttcaactgttgctacaaaattgggtgcaagaaacatgactttcgttgtttctggtgttttgttgttgaactatttggtttctatctcaatcggtattatttggccacaagtttttaaatctaacatcatgatcttgtcacatgctatcttggcattctgtttgatcttccaaacaagagaattagctttggcaaattatgcttctgcaccatcaagacaatttttcgagtttatttggttgttgtactacgctgaatattttgtttacgtttttatttga

SEQ ID NO: 204 - protein, 316 aa, synthetic construct
IEGSPHCESVNSIATKILNFGHTCWKLQRPYVVKGMISIACGLFGRELLNNRHLFSWGLMWKAFFALVPILSFNFFAACMNQIYDVDIDRINKPDLPLVSGEMSIETAWILSIIVALTGLIVTIKLKSAPLFVFIYIFGIFAGFAYSVPPIRLKQYPFTNFLITISSHVGLAFTVYTATRSALGLPFAWRPAFLFIIAFMTVMGMTIAFAKDISDIEGDAKYGVSTVATKLGARNMTFVVSGVLLLNYLVSISIGIIWPQVFKSNIMILSHAILAFCLIFQTRELALANYASAPSRQFFEFIWLLYYAEYFVYVFI

SEQ ID NO: 205 - DNA, 951 bp, synthetic construct
  source 1..951: mol_type = other DNA
attgaaggttcaggtcattgtgaatctgataactcaatcgcaactaaaattttgaactttggtcatacatgttggaaattgcaaagaccatacgttgttaagggtatgatttctattgcttctggtttatttggtagagaattgttgaataacccacatttgttttcttggggtttgatgtggaaagcaactttcgcattagttccaatcttgtcttttaatttctttgctgcatgtatgaaccaaatatatgatgttgatattgatagaattaataagccagatttgccattggtttctggtgaaatgtcaatcgaaactgcttggattttatctatcatcgttgcattgactggtttgatcgttacaatttggttaaaatcagctccattgttcgtctttatatatatcttcggtatcttcgctggttttgcatactctgttccaccaattagattgaagcaatacccttttactaatttcttgatcacaatttcttcacatgttggtttggcttttactacttacactgctactagatctgcattaggtttgccatttgcttggtctccagctttttcttttattatcgcttttatgactgttatgtctatgacaatcgctttcgcaaaggatatctctgatattgaaggtgacgctaaatacggtgtttcaactgttgctacaaaattgggtgcaagaaacatgactttcgttgtttctggtgttttgttgttgaactatttggtttctatctcaatcggtattatttggccacaagtttttaaatctaacatcatgatcttgtcacatgctatcttggcattcatgttgatcttccaaacaagagaattagctttggcaaattatgaatctgcaccatcaagacaatttttcgagtttatttggttgttgtactacgctgaatattttgtttacgtttttatttga

SEQ ID NO: 206 - protein, 316 aa, synthetic construct
IEGSGHCESDNSIATKILNFGHTCWKLQRPYVVKGMISIASGLFGRELLNNPHLFSWGLMWKATFALVPILSFNFFAACMNQIYDVDIDRINKPDLPLVSGEMSIETAWILSIIVALTGLIVTIWLKSAPLFVFIYIFGIFAGFAYSVPPIRLKQYPFTNFLITISSHVGLAFTTYTATRSALGLPFAWSPAFSFIIAFMTVMSMTIAFAKDISDIEGDAKYGVSTVATKLGARNMTFVVSGVLLLNYLVSISIGIIWPQVFKSNIMILSHAILAFMLIFQTRELALANYESAPSRQFFEFIWLLYYAEYFVYVFI

SEQ ID NO: 207 - DNA, 951 bp, synthetic construct
  source 1..951: mol_type = other DNA
attgaaggttcaggtcattgtgaatctgttaactcaatcgcaactaaaattttgaactttggtcatacatgttggaaattgcaaagaccatacgttgttaagggtatgatttctattgcttgtggtttatttggtagagaattgtttaataacagacatttgttttcttggggtttgatgtggaaagcaactttcgcattagttccaatcttgtcttttaatttctttgctgcaatcatgaaccaaatatatgatgttgatattgatagaattaataagccagatttgccattggtttctggtgaaatgtcaatcgaaactgcttggattttatctatcatcgttgcattgactggtttgatcgttacaattaaattaaaatcagctccattgttcgttggtatatatatcttcggtatcttcgctggttttgcatactctgttccaccaattagattgaagcaatacccttttactaatttcttgatcacaatttcttcacatgttggtttggcttttacttcttacactgctactagatctgcattaggtttgccatttgtttggaggccagctttttcttttattatcgcttttatgactgttatgggtatgacaatcgctttcgcaaaggatatctctgatattgaaggtgacgctaaatacggtgtttcaactgttgctacaaaattgggtgcaagaaacatgactttcgttgtttctggtgttttgttgttgaactatgctgtttctatctcaatcggtattatttggccacaagtttttaaatctaacatcatgatcttgtcacatgctatcttggcattcgctttgatcttcagaacaagagaattagctttggcaaattatgaatctgcaccagctagacaatttttcgagtttatttggttgttgtactacgctgaatattttgtttacgtttttatttga

SEQ ID NO: 208 - protein, 316 aa, synthetic construct
IEGSGHCESVNSIATKILNFGHTCWKLQRPYVVKGMISIACGLFGRELFNNRHLFSWGLMWKATFALVPILSFNFFAAIMNQIYDVDIDRINKPDLPLVSGEMSIETAWILSIIVALTGLIVTIKLKSAPLFVGIYIFGIFAGFAYSVPPIRLKQYPFTNFLITISSHVGLAFTSYTATRSALGLPFVWRPAFSFIIAFMTVMGMTIAFAKDISDIEGDAKYGVSTVATKLGARNMTFVVSGVLLLNYAVSISIGIIWPQVFKSNIMILSHAILAFALIFRTRELALANYESAPARQFFEFIWLLYYAEYFVYVFI

SEQ ID NO: 209 - DNA, 951 bp, synthetic construct
  source 1..951: mol_type = other DNA
attgaaggttcaccacattgtgaatctgttaactcaatcgcaactaaaattttgaactttggtcatacatgttggaaattgcaaagaccatacgttgttaagggtatgatttctattgcttgtggtttatttggtagagaattgtttaataacagacatttgttttcttggggtttgatgtggaaagcatttttcgcattagttccaatcttgtcttttaatttctttgctgcatgtatgaaccaaatatatgatgttgatattgatagaattaataagccagatttgccattggtctctggtgaaatgtcaatcgaaactgcttggattttatctatcatcgttgcattgactggtttgatcgttacaattaaattaaaatcagctccattgttcgtttttatatatatcttcggtatcttcgctggttttgcatactctgttccaccaattagatggaagcaatacccttttactaatttcttgatcacaatttcttcacatgttggtttggcttttacttcttacgctgctactagatctgcattaggtttgccatttgcttggtctccagctttttcttttattatcgcttttatgactgttatgggtatgacaatcgctttcgcaaaggatatctctgatattgaaggtgacgctaaatacggtgtttcaactgttgctacaaaattgggtgcaagaaacatgactttcgttgtttctggtgttttgttgttgaactatttggtttctatctcaatcggtattatttggccacaagtttttaaatctaacatcatgatcttgtcacatgctatcttggcattctgtttgatcttccaaacaagagaattagctttggcaaattatgaatctgcaccagctagacaatttttcgagtttatttggttgttgtactacgctgaatattttgtttacgtttttatttga

SEQ ID NO: 210 - protein, 316 aa, synthetic construct
IEGSPHCESVNSIATKILNFGHTCWKLQRPYVVKGMISIACGLFGRELFNNRHLFSWGLMWKAFFALVPILSFNFFAACMNQIYDVDIDRINKPDLPLVSGEMSIETAWILSIIVALTGLIVTIKLKSAPLFVFIYIFGIFAGFAYSVPPIRWKQYPFTNFLITISSHVGLAFTSYAATRSALGLPFAWSPAFSFIIAFMTVMGMTIAFAKDISDIEGDAKYGVSTVATKLGARNMTFVVSGVLLLNYLVSISIGIIWPQVFKSNIMILSHAILAFCLIFQTRELALANYESAPARQFFEFIWLLYYAEYFVYVFI

SEQ ID NO: 211 - DNA, 951 bp, synthetic construct
  source 1..951: mol_type = other DNA
attgaaggttcaccacattgtgaatctgttaactcaatcgcaactaaaattttgaactttggtcatacatgttggaaattgcaaagaccatacgttgttaagggtatgatttctattgcttctggtttatttggtaaagaattgtttaataacagacatttgttttcttggggtttgatgtggaaagcatttttcgcattagttccaatcttgtcttttaatttctttgctgcagctatgaaccaaatatatgatgttgatattgatagaattaataagccagatttgccattggtttctggtgaaatgtcaatcgaaactgcttggattttatctatcatcgttgcattgactggtttgatcgttacaatttggttaaaatcagctccattgttcgtttttatatatatcttcggtatcttcgctggttttgcatactctgttccaccaattagatggaagcaatacccttttactaatttcttgatcacaatttcttcacatgttggtttggcttttactgtttactcagctactagatctgcattaggtttgccatttgtttggtctccagctttttcttttattatcgcttttatgactgttatgggtatgacaatcgctttcgcaaaggatatctctgatattgaaggtgacgctaaatacggtgtttcaactgttgctacaaaattgggtgcaagaaacatgactttcgttgtttctggtgttttgttgttgaactatttggtttctatctcaatcggtattatttggccacaagtttttaaatctaacatcatgatcttgtcacatgctatcttggcattctgtttgatcttccaaacaagagaattagctttggcaaattatgcttctgcaccatcaagacaatttttcgagtttatttggttgttgtactacgctgaatattttgtttacgtttttatttga

SEQ ID NO: 212 - protein, 316 aa, synthetic construct
IEGSPHCESVNSIATKILNFGHTCWKLQRPYVVKGMISIASGLFGKELFNNRHLFSWGLMWKAFFALVPILSFNFFAAAMNQIYDVDIDRINKPDLPLVSGEMSIETAWILSIIVALTGLIVTIWLKSAPLFVFIYIFGIFAGFAYSVPPIRWKQYPFTNFLITISSHVGLAFTVYSATRSALGLPFVWSPAFSFIIAFMTVMGMTIAFAKDISDIEGDAKYGVSTVATKLGARNMTFVVSGVLLLNYLVSISIGIIWPQVFKSNIMILSHAILAFCLIFQTRELALANYASAPSRQFFEFIWLLYYAEYFVYVFI

SEQ ID NO: 213 - DNA, 951 bp, synthetic construct
  source 1..951: mol_type = other DNA
attgaaggttcaggtcattgtgaatctgttaactcaatcgcaactaaaattttgaactttggtcatacatgttggaaattgcaaagaccatacgttgttaagggtatgatttctattgcttgtggtttatttggtagagaattgtttaataacagacatttgttttcttggggtttgatgtggaaagcatttttcgcattagttccaatcttgtcttttaatttctttgctgcatgtatgaaccaaatatatgatgttgatattgatagaattaataagccagatttgccattggtttctggtgaaatgtcaatcgaaactgcttggattttatctatcatcgttgcattgactggtttgatcgttacaatttggttaaaatcagctccattgttcgtttttatatatatcttcggtatcttcgctggttttgcatactctgttccaccaattagatggaagcaatacccttttactaatttcttgatcacaatttcttcacatgttggtttggcttttactgtttacactgctactacatctgcattaggtttgccatttgtttggtctccagctttttcttttattatcgcttttatgactgttatgtctggtacaatcgctttcgcaaaggatatctctgatattgaaggtgacgctaaatacggtgtttcaactgttgctacaaaattgggtgcaagaaacatgactttcgttgtttctggtgttttgttgttgaactatgctgttgctatctcaatcggtattatttggccacaagtttttaaatctaacatcatgatcttgtcacatgctatcttggcattcatgttgatcttccaaacaagagaattagctttggcaaattatgaatctgcaccatcaagacaatttttcgagtttatttggttgttgtactacgctgaatattttgtttacgtttttatttga

SEQ ID NO: 214 - protein, 316 aa, synthetic construct
IEGSGHCESVNSIATKILNFGHTCWKLQRPYVVKGMISIACGLFGRELFNNRHLFSWGLMWKAFFALVPILSFNFFAACMNQIYDVDIDRINKPDLPLVSGEMSIETAWILSIIVALTGLIVTIWLKSAPLFVFIYIFGIFAGFAYSVPPIRWKQYPFTNFLITISSHVGLAFTVYTATTSALGLPFVWSPAFSFIIAFMTVMSGTIAFAKDISDIEGDAKYGVSTVATKLGARNMTFVVSGVLLLNYAVAISIGIIWPQVFKSNIMILSHAILAFMLIFQTRELALANYESAPSRQFFEFIWLLYYAEYFVYVFI

SEQ ID NO: 215 - DNA, 951 bp, synthetic construct
  source 1..951: mol_type = other DNA
attgaaggttcaccacatcatgaatctgttaactcaatcgcaactaaaattttgaactttggtcatacatgttggaaattgcaaagaccatacgttgttaagggtatgatttctattgcttgtggtttatttggtaaagaattgtttaataacagacatttgttttcttggggtttgatgtggaaagcatttttcgcattagttccaatcttgtcttttaatttctttgctgcaatcatgaaccaaatatatgatgttgatattgatagaattaataagccagatttgccattggtttctggtgaaatgtcaatcgaaactgcttggattttatctatcatcgttgcattgactggtttgatcgttacaatttggttaaaatcagctccattgttcgtttttatatatatcttcggtatcttcgctggttttgcatactctgttccaccaattagattgaagcaatacccttttactaatttcttgatcacaatttcttcacatgttggtttggcttttactgtttacgctgctactagatctgcattaggtttgccatttgcttggaggccagctttttcttttattatcgcttttatgactgttatgggtatgacaatcgctttcgcaaaggatatctctgatattgaaggtgacgctaaatacggtgtttcaactgttgctacaaaattgggtgcaagaaacatgactttcgttgtttctggtgttttgttgttgaactatttggtttctatctcaatcggtattatttggccacaagtttttaaatctaacatcatgatcttgtcacatgctatcttggcattcatgttgatcttccaaacaagagaattagctttggcaaattatgcttctgcaccagctagacaatttttcgagtttatttggttgttgtactacgctgaatattttgtttacgtttttatttga

SEQ ID NO: 216 - protein, 316 aa, synthetic construct
IEGSPHHESVNSIATKILNFGHTCWKLQRPYVVKGMISIACGLFGKELFNNRHLFSWGLMWKAFFALVPILSFNFFAAIMNQIYDVDIDRINKPDLPLVSGEMSIETAWILSIIVALTGLIVTIWLKSAPLFVFIYIFGIFAGFAYSVPPIRLKQYPFTNFLITISSHVGLAFTVYAATRSALGLPFAWRPAFSFIIAFMTVMGMTIAFAKDISDIEGDAKYGVSTVATKLGARNMTFVVSGVLLLNYLVSISIGIIWPQVFKSNIMILSHAILAFMLIFQTRELALANYASAPARQFFEFIWLLYYAEYFVYVFI

SEQ ID NO: 217 - DNA, 951 bp, synthetic construct
  source 1..951: mol_type = other DNA
attgaaggttcaggtcattgtgaatctgataactcaatcgcaactaaaattttgaactttggtcatacatgttggaaattgcaaagaccatacgttgttaagggtatgatttctattgcttctggtttatttggtagagaattgtttaataacagacatttgttttcttggggtttgatgtggaaagcaactttcgcattagttccaatcttgtcttttaatttctttgctgcaatcatgaaccaaatatatgatgttgatattgatagaattaataagccagatttgccattggtttctggtgaaatgtcaatcgaaactgcttggattttatctatcatcgttgcattgactggtttgatcgttacaatttggttaaaatcagctccattgttcgttggtatatatatcttcggtatcttcgctggttttgcatactctgttccaccaattagatggaagcaatacccttttactaatttcttgatcacaatttcttcacatgttggtttggcttttactgtttacgctgctactacatctgcattaggtttgccatttgcttggaggccagctttttcttttattatcgcttttatgactgttatgggtggtacaatcgctttcgcaaaggatatctctgatattgaaggtgacgctaaatacggtgtttcaactgttgctacaaaattgggtgcaagaaacatgactttcgttgtttctggtgttttgttgttgaactatttggtttctatctcaatcggtattatttggccacaagtttttaaatctaacatcatgatcttgtcacatgctatcttggcattctgtttgatcttccaaacaagagaattagctttggcaaattatgcttctgcaccatcaagacaatttttcgagtttatttggttgttgtactacgctgaatattttgtttacgtttttatttga

SEQ ID NO: 218 - protein, 316 aa, synthetic construct
IEGSGHCESDNSIATKILNFGHTCWKLQRPYVVKGMISIASGLFGRELFNNRHLFSWGLMWKATFALVPILSFNFFAAIMNQIYDVDIDRINKPDLPLVSGEMSIETAWILSIIVALTGLIVTIWLKSAPLFVGIYIFGIFAGFAYSVPPIRWKQYPFTNFLITISSHVGLAFTVYAATTSALGLPFAWRPAFSFIIAFMTVMGGTIAFAKDISDIEGDAKYGVSTVATKLGARNMTFVVSGVLLLNYLVSISIGIIWPQVFKSNIMILSHAILAFCLIFQTRELALANYASAPSRQFFEFIWLLYYAEYFVYVFI

SEQ ID NO: 219 - DNA, 951 bp, synthetic construct
  source 1..951: mol_type = other DNA
attgaaggttcaggtcatcatgaatctgataactcaatcgcaactaaaattttgaactttggtcatacatgttggaaattgcaaagaccatacgttgttaagggtatgatttctattgctgctggtttatttggtaaagaattgtttaataacagacatttgttttcttggggtttgatgtggaaagcatttttcgcattagttccaatcttgtcttttaatttctttgctgcaatcatgaaccaaatatatgatgttgatattgatagaattaataagccagatttgccattggtttctggtgaaatgtcaatcgaaactgcttggattttatctatcatcgttgcattgactggtttgatcgttacaattaaattaaaatcagctccattgttcgttggtatatatatcttcggtatcttcgctggttttgcatactctgttccaccaattagatggaagcagtacccttttactaatttcttgatcacaatttcttcacatgttggtttggcttttactacttactcagctactagatctgcattaggtttgccatttgcttggtctccagctttttcttttattatcgcttttatgactgttatgggtatgacaatcgctttcgcaaaggatatctctgatattgaaggtgacgctaaatacggtgtttcaactgttgctacaaaattgggtgcaagaaacatgactttcgttgtttctggtgttttgttgttgaactatttggtttctatctcaatcggtattatttggccacaagtttttaaatctaacatcatgatcttgtcacatgctatcttggcattctgtttgatcttccaaacaagagaattagctttggcaaattatgcttctgcaccatcaagacaatttttcgagtttatttggttgttgtactacgctgaatattttgtttacgtttttatttga

SEQ ID NO: 220 - protein, 316 aa, synthetic construct
IEGSGHHESDNSIATKILNFGHTCWKLQRPYVVKGMISIAAGLFGKELFNNRHLFSWGLMWKAFFALVPILSFNFFAAIMNQIYDVDIDRINKPDLPLVSGEMSIETAWILSIIVALTGLIVTIKLKSAPLFVGIYIFGIFAGFAYSVPPIRWKQYPFTNFLITISSHVGLAFTTYSATRSALGLPFAWSPAFSFIIAFMTVMGMTIAFAKDISDIEGDAKYGVSTVATKLGARNMTFVVSGVLLLNYLVSISIGIIWPQVFKSNIMILSHAILAFCLIFQTRELALANYASAPSRQFFEFIWLLYYAEYFVYVFI

SEQ ID NO: 221 - DNA, 951 bp, synthetic construct
  source 1..951: mol_type = other DNA
attgaaggttcaccacattgtgaatctgttaactcaatcgcaactaaaattttgaactttggtcatacatgttggaaattgcaaagaccatacgttgttaagggtatgatttctattgctgctggtttatttggtagagaattgtttaataacccacatttgttttcttggggtttgatgtggaaagcatttttcgcattagttccaatcttgtcttttaatttctttgctgcaatcatgaaccaaatatatgatgttgatattgatagaattaataagccagatttgccattggtttctggtgaaatgtcaatcgaaactgcttggattttgtctatcatcgttgcattgactggtttgatcgttacaatttggttaaaatcagctccattgttcgttggtatatatatcttcggtatcttcgctggttttgcatactctgttccaccaattagatggaagcaatacccttttactaatttcttgatcacaatttcttcacatgttggtttggcttttacttcttacactgctactacatctgcattaggtttgccatttgtttggaggccagcttttgtttttattatcgcttttatgactgttatgggtatgacaatcgctttcgcaaaggatatctctgatattgaaggtgacgctaaatacggtgtttcaactgttgctacaaaattgggtgcaagaaacatgactttcgttgtttctggtgttttgttgttgaactatttggtttctatctcaatcggtattatttggccacaagtttttaaatctaacatcatgatcttgtcacatgctatcttggcattctgtttgatcttccaaacaagagaattagctttggcaaattatgcttctgcaccatcaagacaatttttcgagtttatttggttgttgtactacgctgaatattttgtttacgtttttatttga

SEQ ID NO: 222 - protein, 316 aa, synthetic construct
IEGSPHCESVNSIATKILNFGHTCWKLQRPYVVKGMISIAAGLFGRELFNNPHLFSWGLMWKAFFALVPILSFNFFAAIMNQIYDVDIDRINKPDLPLVSGEMSIETAWILSIIVALTGLIVTIWLKSAPLFVGIYIFGIFAGFAYSVPPIRWKQYPFTNFLITISSHVGLAFTSYTATTSALGLPFVWRPAFVFIIAFMTVMGMTIAFAKDISDIEGDAKYGVSTVATKLGARNMTFVVSGVLLLNYLVSISIGIIWPQVFKSNIMILSHAILAFCLIFQTRELALANYASAPSRQFFEFIWLLYYAEYFVYVFI

SEQ ID NO: 223 - DNA, 951 bp, synthetic construct
  source 1..951: mol_type = other DNA
attgaaggttcaggtcatcatgaatctgttaactcaatcgcaactaaaattttgaactttggtcatacatgttggaaattgcaaagaccatacgttgttaagggtatgatttctattgcttgtggtttatttggtagagaattgtttaataacccacatttgttttcttggggtttgatgtggaaagcatttttcgcattagttccaatcttgtcttttaatttctttgctgcatgtatgaaccaaatatatgatgttgatattgatagaattaataagccagatttgccattggtttctggtgaaatgtcaatcgaaactgcttggattttatctatcatcgttgcattgactggtttgatcgttacaatttggttaaaatcagctccattgttcgtttttatatatatcttcggtatcttcgctggttttgcatactctgttccaccaattagattgaagcaatacccttttactaatttcttgatcacaatttcttcacatgttggtttggcttttacttcttactcagctactacatctgcattaggtttgccatttgtttggaggccagctttttcttttattatcgcttttatgactgttatgggtatgacaatcgctttcgcaaaggatatctctgatattgaaggtgacgctaaatacggtgtttcaactgttgctacaaaattgggtgcaagaaacatgactttcgttgtttctggtgttttgttgttgaactatttggtttctatctcaatcggtattatttggccacaagtttttaaatctaacatcatgatcttgtcacatgctatcttggcattctgtttgatcttccaaacaagagaattagctttggcaaattatgcttctgcaccatcaagacaatttttcgagtttatttggttgttgtactacgctgaatattttgtttacgtttttatttga

SEQ ID NO: 224 - protein, 316 aa, synthetic construct
IEGSGHHESVNSIATKILNFGHTCWKLQRPYVVKGMISIACGLFGRELFNNPHLFSWGLMWKAFFALVPILSFNFFAACMNQIYDVDIDRINKPDLPLVSGEMSIETAWILSIIVALTGLIVTIWLKSAPLFVFIYIFGIFAGFAYSVPPIRLKQYPFTNFLITISSHVGLAFTSYSATTSALGLPFVWRPAFSFIIAFMTVMGMTIAFAKDISDIEGDAKYGVSTVATKLGARNMTFVVSGVLLLNYLVSISIGIIWPQVFKSNIMILSHAILAFCLIFQTRELALANYASAPSRQFFEFIWLLYYAEYFVYVFI

SEQ ID NO: 225 - DNA, 951 bp, synthetic construct
  source 1..951: mol_type = other DNA
attgaaggttcaggtcattgtgaatctgttaactcaatcgcaactaaaattttgaactttggtcatacatgttggaaattgcaaagaccatacgttgttaagggtatgatttctattgcttgtggtttatttggtagagaattgttgaataacagacatttgttttcttggggtttgatgtggaaagcatttttcgcattagttccaatcttgtcttttaatttctttgctgcaatcatgaaccaaatatatgatgttgatattgatagaattaataagccagatttgccattggtttctggtgaaatgtcaatcgaaactgcttggattttatctatcatcgttgcattgactggtttgatcgttacaatttggttaaaatcagctccattgttcgttggtatatatatcttcggtatcttcgctggttttgcatactctgttccaccaattagattgaagcaatacccttttactaatttcttgatcacaatttcttcacatgttggtttggcttttacttcttactcagctactacatctgcattaggtttgccatttgtttggaggccagcttttttgtttattatcgcttttatgactgttatgtctatgacaatcgctttcgcaaaggatatctctgatattgaaggtgacgctaaatacggtgtttcaactgttgctacaaaattgggtgcaagaaacatgactttcgttgtttctggtgttttgttgttgaactatttggtttctatctcaatcggtattatttggccacaagtttttaaatctaacatcatgatcttgtcacatgctatcttggcattctgtttgatcttcagaacaagagaattagctttggcaaattatgcttctgcaccagctagacaatttttcgagtttatttggttgttgtactacgctgaatattttgtttacgtttttatttga

SEQ ID NO: 226 - protein, 316 aa, synthetic construct
IEGSGHCESVNSIATKILNFGHTCWKLQRPYVVKGMISIACGLFGRELLNNRHLFSWGLMWKAFFALVPILSFNFFAAIMNQIYDVDIDRINKPDLPLVSGEMSIETAWILSIIVALTGLIVTIWLKSAPLFVGIYIFGIFAGFAYSVPPIRLKQYPFTNFLITISSHVGLAFTSYSATTSALGLPFVWRPAFLFIIAFMTVMSMTIAFAKDISDIEGDAKYGVSTVATKLGARNMTFVVSGVLLLNYLVSISIGIIWPQVFKSNIMILSHAILAFCLIFRTRELALANYASAPARQFFEFIWLLYYAEYFVYVFI

SEQ ID NO: 227 - DNA, 951 bp, synthetic construct
  source 1..951: mol_type = other DNA
attgaaggttcaggtcatcatgaatctgataactcaatcgcaactaaaattttgaactttggtcatacatgttggaaattgcaaagaccatacgttgttaagggtatgatttctattgcttgtggtttatttggtagagaattgtttaataacccacatttgttttcttggggtttgatgtggaaagcaactttcgcattagttccaatcttgtcttttaatttctttgctgcatgtatgaaccaaatatatgatgttgatattgatagaattaataaaccaaatttgccattggtttctggtgaaatgtcaatcgaaactgcttggattttatctatcatcgttgcattgactggtttgatcgttacaattaaattaaaatcagctccattgttcgtttttatatatatcttcggtatcttcgctggttttgcatactctgttccaccaattagatggaagcaatacccttttactaatttcttgatcacaatttcttcacatgttggtttggcttttacttcttactcagctactacatctgcattaggtttgccatttgtttggaggccagctttttcttttattatcgcttttatgactgttatgggtatgacaatcgctttcgcaaaggatatctctgatattgaaggtgacgctaaatacggtgtttcaactgttgctacaaaattgggtgcaagaaacatgactttcgttgtttctggtgttttgttgttgaactatttggtttctatctcaatcggtattatttggccacaagtttttaaatctaacatcatgatcttgtcacatgctatcttggcattctgtttgatcttccaaacaagagaattagctttggcaaattatgcttctgcaccatcaagacaatttttcgagtttatttggttgttgtactacgctgaatattttgtttacgtttttatttga

SEQ ID NO: 228 - protein, 316 aa, synthetic construct
IEGSGHHESDNSIATKILNFGHTCWKLQRPYVVKGMISIACGLFGRELFNNPHLFSWGLMWKATFALVPILSFNFFAACMNQIYDVDIDRINKPNLPLVSGEMSIETAWILSIIVALTGLIVTIKLKSAPLFVFIYIFGIFAGFAYSVPPIRWKQYPFTNFLITISSHVGLAFTSYSATTSALGLPFVWRPAFSFIIAFMTVMGMTIAFAKDISDIEGDAKYGVSTVATKLGARNMTFVVSGVLLLNYLVSISIGIIWPQVFKSNIMILSHAILAFCLIFQTRELALANYASAPSRQFFEFIWLLYYAEYFVYVFI

SEQ ID NO: 229 - DNA, 951 bp, synthetic construct
  source 1..951: mol_type = other DNA
attgaaggttcaggtcattgtgaatctgataactcaatcgcaactaaaattttgaactttggtcatacatgttggaaattgcaaagaccatacgttgttaagggtatgatttctattgcttgtggtttatttggtagagaattgtttaataacagacatttgttttcttggggtttgatgtggaaagcatttttcgcattagttccaatcttgtcttttaatttctttgctgcagctatgaaccaaatatatgatgttgatattgatagaattaataagccagatttgccattggtttctggtgaaatgtcagtcgaaactgcttggattttatctatcatcgttgcattgactggtttgatcgttacaattaaattaaaatcagctccattgttcgtttttatatatatcttcggtatcttcgctggttttgcatactctgttccaccaattagatggaagcaatacccttttactaatttcttgatcacaatttcttcacatgttggtttggcttttacttcttacgctgctactagatctgcattaggtttgccatttgtttggaggccagcttttgtttttattatcgcttttatgactgttatgggtggtacaatcgctttcgcaaaggatatctctgatattgaaggtgacgctaaatacggtgtttcaactgttgctacaaaattgggtgcaagaaacatgactttcgttgtttctggtgttttgttgttgaactatttggtttctatctcaatcggtattatttggccacaagtttttaaatctaacatcatgatcttgtcacatgctatcttggcattctgtttgatcttcagaacaagagaattagctttggcaaattatgcttctgcaccagctagacaatttttcgagtttatttggttgttgtactacgctgaatattttgtttacgcttttatttga

SEQ ID NO: 230 - protein, 316 aa, synthetic construct
IEGSGHCESDNSIATKILNFGHTCWKLQRPYVVKGMISIACGLFGRELFNNRHLFSWGLMWKAFFALVPILSFNFFAAAMNQIYDVDIDRINKPDLPLVSGEMSVETAWILSIIVALTGLIVTIKLKSAPLFVFIYIFGIFAGFAYSVPPIRWKQYPFTNFLITISSHVGLAFTSYAATRSALGLPFVWRPAFVFIIAFMTVMGGTIAFAKDISDIEGDAKYGVSTVATKLGARNMTFVVSGVLLLNYLVSISIGIIWPQVFKSNIMILSHAILAFCLIFRTRELALANYASAPARQFFEFIWLLYYAEYFVYAFI

SEQ ID NO: 231 - DNA, 951 bp, synthetic construct
  source 1..951: mol_type = other DNA
attgaaggttcaccacatcatgaatctgttaactcaatcgcaactaaaattttgaactttggtcatacatgttggaaattgcaaagaccatacgttgttaagggtatgatttctattgcttctggtttatttggtaaagaattgtttaataacccacatttgttttcttggggtttgatgtggaaagcaactttcgcattagttccaatcttgtcttttaatttctttgctgcaatcatgaaccaaatatatgatgttgatattgatagaattaataagccagatttgccattggtttctggtgaaatgtcaatcgaaactgcttggattttatctatcatcgttgcattgactggtttgatcgttacaattaaattaaaatcagctccattgttcgttggtatatatatcttcggtatcttcgctggttttgcatactctgttccaccaattagatggaagcaatacccttttactaatttcttgatcacaatttcttcacatgttggtttggcttttacttcttacgctgctactagatctgcattaggtttgccatttgtttggaggccagctttttcttttattatcgcttttatgactgttatgggtatgacaatcgctttcgcaaaggatatctctgatattgaaggtgacgctaaatacggtgtttcaactgttgctacaaaattgggtgcaagaaacatgactttcgttgtttctggtgttttgttgttgaactatttggtttctatctcaatcggtattatttggccacaagtttttaaatctaacatcatgatcttgtcacatgctatcttggcattctgtttgatcttccaaacaagagaattagctttggcaaattatgcttctgcaccatcaagacaatttttcgagtttatttggttgttgtactacgctgaatattttgtttacgtttttatttga

SEQ ID NO: 232 - protein, 316 aa, synthetic construct
IEGSPHHESVNSIATKILNFGHTCWKLQRPYVVKGMISIASGLFGKELFNNPHLFSWGLMWKATFALVPILSFNFFAAIMNQIYDVDIDRINKPDLPLVSGEMSIETAWILSIIVALTGLIVTIKLKSAPLFVGIYIFGIFAGFAYSVPPIRWKQYPFTNFLITISSHVGLAFTSYAATRSALGLPFVWRPAFSFIIAFMTVMGMTIAFAKDISDIEGDAKYGVSTVATKLGARNMTFVVSGVLLLNYLVSISIGIIWPQVFKSNIMILSHAILAFCLIFQTRELALANYASAPSRQFFEFIWLLYYAEYFVYVFI

SEQ ID NO: 233 - DNA, 951 bp, synthetic construct
  source 1..951: mol_type = other DNA
attgaaggttcaggtcatcatgaatctgttaactcaatcgcaactaaaattttgaactttggtcatacatgttggaaattgcaaagaccatacgttgttaagggtatgatttctattgcttgtggtttatttggtaaagaattgtttaataacccacatttgttttcttggggtttgatgtggaaagcaactttcgcattagttccaatcttgtcttttaatttctttgctgcatgtatgaaccaaatatatgatgttgatattgatagaattaataagccagatttgccattggtttctggtgaaatgtcaatcgaaactgcttggattttatctatcatcgttgcattgactggtttgatcgttacaatttggttaaaatcagctccattgttcgtttttatatatatcttcggtatcttcgctggttttgcatactctgttccaccaattagattgaagcaatacccttttactaatttcttgatcacaatttcttcacatgttggtttggcttttacttcttactcagctactagatctgcattaggtttgccatttgtttggaggccagctttttcttttattatcgcttttatgactgttatgggtatgacaatcgctttcgcaaaggatatctctgatattgaaggtgacgctaaatacggtgtttcaactgttgctacaaaattgggtgcaagaaacatgactttcgttgtttctggtgttttgttgttgaactatttggtttctatctcaatcggtattatttggccacaagtttttaaatctaacatcatgatcttgtcacatgctatcttggcattctgtttgatcttccaaacaagagaattagctttggcaaattatgcttctgcaccatcaagacaatttttcgagtttatttggttgttgtactacgctgaatattttgtttacgtttttatttga

SEQ ID NO: 234 - protein, 316 aa, synthetic construct
IEGSGHHESVNSIATKILNFGHTCWKLQRPYVVKGMISIACGLFGKELFNNPHLFSWGLMWKATFALVPILSFNFFAACMNQIYDVDIDRINKPDLPLVSGEMSIETAWILSIIVALTGLIVTIWLKSAPLFVFIYIFGIFAGFAYSVPPIRLKQYPFTNFLITISSHVGLAFTSYSATRSALGLPFVWRPAFSFIIAFMTVMGMTIAFAKDISDIEGDAKYGVSTVATKLGARNMTFVVSGVLLLNYLVSISIGIIWPQVFKSNIMILSHAILAFCLIFQTRELALANYASAPSRQFFEFIWLLYYAEYFVYVFI

SEQ ID NO: 235 - DNA, 951 bp, synthetic construct
  source 1..951: mol_type = other DNA
attgaaggttcaccacattgtgaatctgataactcaatcgcaactaaaattttgaactttggtcatacatgttggaaattgcaaagaccatacgttgttaagggtatgatttctattgcttctggtttatttggtagagaattgtttaataacccacatttgttttcttggggtttgatgtggaaagcatttttcgcattagttccaatcttgtcttttaatttctttgctgcatgtatgaaccaaatatatgatgttgatattgatagaattaataagccagatttgccattggtttctggtgaaatgtcaatcgaaactgcttggattttatctatcatcgttgcattgactggtttgatcgttacaatttggttaaaatcagctccattgttcgttggtatatatatcttcggtatcttcgctggttttgcatactctgttccaccaattagattgaagcaatacccttttactaatttcttgatcacaatttcttcacatgttggtttggcttttactacttactcagctactatatctgcattaggtttgccatttgcttggtctccagctttttcttttattatcgcttttatgactgttatgggtatgacaatcgctttcgcaaaggatatctctgatattgaaggtgacgctaaatacggtgtttcaactgttgctacaaaattgggtgcaagaaacatgactttcgttgtttctggtgttttgttgttgaactatgctgttgctatctcaatcggtattatttggccacaagtttttaaatctaacatcatgatcttgtcacatgctatcttggcattctgtttgatcagaagaacaagagaattagctttggcaaattatgcttctgcaccagctagacaatttttcgagtttatttggttgttgtactacgctgaatattttgtttacgtttttatttga

SEQ ID NO: 236 - protein, 316 aa, synthetic construct
IEGSPHCESDNSIATKILNFGHTCWKLQRPYVVKGMISIASGLFGRELFNNPHLFSWGLMWKAFFALVPILSFNFFAACMNQIYDVDIDRINKPDLPLVSGEMSIETAWILSIIVALTGLIVTIWLKSAPLFVGIYIFGIFAGFAYSVPPIRLKQYPFTNFLITISSHVGLAFTTYSATISALGLPFAWSPAFSFIIAFMTVMGMTIAFAKDISDIEGDAKYGVSTVATKLGARNMTFVVSGVLLLNYAVAISIGIIWPQVFKSNIMILSHAILAFCLIRRTRELALANYASAPARQFFEFIWLLYYAEYFVYVFI

SEQ ID NO: 237 - DNA, 951 bp, synthetic construct
  source 1..951: mol_type = other DNA
attgaaggttcaccacattgtgaatctgttaactcaatcgcaactaaaattttgaactttggtcatacatgttggaaattgcaaagaccatacgttgtcaagggtatgatttctattgcttgtggtttatttggtagagaattgtttaataacagacatttgttttcttggggtttgatgtggaaagcatttttcgcattagttccaatcttgtcttttaatttctttgctgcaatcatgaaccaaatatatgatgttgatattgatagaattaataagccagatttgccattggtttctggtgaaatgtcaatcgaaactgcttggattttatctatcatcgttgcattgactggtttgatcgttacaatttggttaaaatcagctccattgttcgttggtatatatatcttcggtatcttcgctggttttgcatactctgttccaccaattagattgaagcaatacccttttactaatttcttgatcacaatttcttcacatgttggtttggcttttactacttacactgctactacatctgcattaggtttgccatttgtttggaggccagctttttcttttattatcgcttttatgactgttatgggtatgacaatcgctttcgcaaaggatatctctgatattgaaggtgacgctaaatacggtgtttcaactgttgctacaaaattgggtgcaagaaacatgactttcgttgtttctggtgttttgttgttgaactatttggtttctatctcaatcggtattatttggccacaagtttttaaatctaacatcatgatcttgtcacatgctatcttggcattctgtttgatcttccaaacaagagaattagctttggcaaattatgcttctgcaccatcaagacaatttttcgagtttatttggttgttgtactacgctgaatattttgtttacgtttttatttga

SEQ ID NO: 238 - protein, 316 aa, synthetic construct
IEGSPHCESVNSIATKILNFGHTCWKLQRPYVVKGMISIACGLFGRELFNNRHLFSWGLMWKAFFALVPILSFNFFAAIMNQIYDVDIDRINKPDLPLVSGEMSIETAWILSIIVALTGLIVTIWLKSAPLFVGIYIFGIFAGFAYSVPPIRLKQYPFTNFLITISSHVGLAFTTYTATTSALGLPFVWRPAFSFIIAFMTVMGMTIAFAKDISDIEGDAKYGVSTVATKLGARNMTFVVSGVLLLNYLVSISIGIIWPQVFKSNIMILSHAILAFCLIFQTRELALANYASAPSRQFFEFIWLLYYAEYFVYVFI

SEQ ID NO: 239 - DNA, 951 bp, synthetic construct
  source 1..951: mol_type = other DNA
attgaaggttcaggtcatcatgaatctgataactcaatcgcaactaaaattttgaactttggtcatacatgttggaaattgcaaagaccatacgttgttaagggtatgatttctattgcttctggtttatttggtaaagaattgtttaataacagacatttgttttcttggggtttgatgtggaaagcatttttcgcattagttccaatcttgtcttttaatttctttgctgcaatcatgaaccaaatatatgatgttgatattgatagaattaataagccagatttgccattggtttctggtgaaatgtcaatcgaaactgcttggattttatctatcatcgttgcattgactggtttgatcgttacaatttggttaaaatcagctccattgttcgttggtatatatatcttcggtatcttcgctggttttgcatactctgttccaccaattagattgaagcaatacccttttactaatttcttgatcacaatttcttcacatgttggtttggcttttactacttacgctgctactacatctgcattaggtttgccatttgtttggaggccagcttttgtttttattatcgcttttatgactgttatgggtatgacaatcgctttcgcaaaggatatctctgatattgaaggtgacgctaaatacggtgtttcaactgttgctacaaaattgggtgcaagaaacatgactttcgttgtttctggtgttttgttgttgaactatttggtttctatctcaatcggtattatttggccacaagtttttaaatctaacatcatgatcttgtcacatgctatcttggcattctgtttgatcttccaaacaagagaattagctttggcaaattatgcttctgcaccatcaagacaatttttcgagtttatttggttgttgtactacgctgaatattttgtttacgtttttatttga

SEQ ID NO: 240 - protein, 316 aa, synthetic construct
IEGSGHHESDNSIATKILNFGHTCWKLQRPYVVKGMISIASGLFGKELFNNRHLFSWGLMWKAFFALVPILSFNFFAAIMNQIYDVDIDRINKPDLPLVSGEMSIETAWILSIIVALTGLIVTIWLKSAPLFVGIYIFGIFAGFAYSVPPIRLKQYPFTNFLITISSHVGLAFTTYAATTSALGLPFVWRPAFVFIIAFMTVMGMTIAFAKDISDIEGDAKYGVSTVATKLGARNMTFVVSGVLLLNYLVSISIGIIWPQVFKSNIMILSHAILAFCLIFQTRELALANYASAPSRQFFEFIWLLYYAEYFVYVFI

SEQ ID NO: 241 - DNA, 951 bp, synthetic construct
  source 1..951: mol_type = other DNA
attgaaggttcaggtcatcatgaatctgttaactcaatcgcaactaaaattttgaactttggtcatacatgttggaaattgcaaagaccatacgttgttaagggtatgatttctattgcttgtggtttatttggtagagaattgtttaataacagacatttgttttcttggggtttgatgtggaaagcatttttcgcattagttccaatcttgtcttttaatttctttgctgcagctatgaaccaaatatatgatgttgatattgatagaattaataagccagatttgccattggtttctggtgaaatgtcaatcgaaactgcttggattttatctatcatcgttgcattgactggtttgatcgttacaatttggttaaaatcagctccattgttcgttggtatatatatcttcggtatcttcgctggttttgcatactctgttccaccaattagatggaagcaatacccttttactaatttcttgatcacaatttcttcacatgttggtttggcttttactgtttactcagctactacatctgcattaggtttgccatttgtttggaggccagctttttcttttattatcgcttttatgactgttatgggtatgacaatcgctttcgcaaaggatatctctgatattgaaggtgacgctaaatacggtgtttcaactgttgctacaaaattgggtgcaagaaacatgactttcgttgtttctggtgttttgttgttgaactatttggtttctatctcaatcggtattatttggccacaagtttttaaatctaacatcatgatcttgtcacatgctatcttggcattcatgttgatcttcagaacaagagaattagctttggcaaattatgaatctgcaccagctagacaatttttcgagtttatttggttgttgtactacgctgaatattttgtttacgtttttatttga

SEQ ID NO: 242 - protein, 316 aa, synthetic construct
IEGSGHHESVNSIATKILNFGHTCWKLQRPYVVKGMISIACGLFGRELFNNRHLFSWGLMWKAFFALVPILSFNFFAAAMNQIYDVDIDRINKPDLPLVSGEMSIETAWILSIIVALTGLIVTIWLKSAPLFVGIYIFGIFAGFAYSVPPIRWKQYPFTNFLITISSHVGLAFTVYSATTSALGLPFVWRPAFSFIIAFMTVMGMTIAFAKDISDIEGDAKYGVSTVATKLGARNMTFVVSGVLLLNYLVSISIGIIWPQVFKSNIMILSHAILAFMLIFRTRELALANYESAPARQFFEFIWLLYYAEYFVYVFI

SEQ ID NO: 243 - DNA, 951 bp, synthetic construct
  source 1..951: mol_type = other DNA
attgaaggttcaggtcatcatgaatctgttaactcaatcgcaactaaaattttgaactttggtcatacatgttggaaattgcaaagaccatacgttgttaagggtatgatttctattgctgctggtttatttggtaaagaattgtttaataacccacatttgttttcttggggtttgatgtggaaagcatttttcgcattagttccaatcttgtcttttaatttctttgctgcgatcatgaaccaaatatatgatgttgatattgatagaattaataagccagatttgccattggtttctggtgaaatgtcaatcgaaactgcttggattttatctatcatcgttgcattgactggtttgatcgttacaattaaattaaaatcagctccattgttcgttggtatatatatcttcggtatcttcgctggttttgcatactctgttccaccaattagattgaagcaatacccttttactaatttcttgatcacaatttcttcacatgttggtttggcttttactacttacactgctactacatctgcattaggtttgccatttgtttggaggccagctttttcttttattatcgcttttatgactgttatgggtggtacaatcgctttcgcaaaggatatctctgatattgaaggtgacgctaaatacggtgtttcaactgttgctacaaaattgggtgcaagaaacatgactttcgttgtttctggtgttttgttgttgaactatgctgttgctatctcaatcggtattatttggccacaagtttttaaatctaacatcatgatcttgtcacatgctatcttggcattctgtttgatcagaagaacaagagaattagctttggcaaattatgaatctgcaccatcaagacaatttttcgagtttatttggttgttgtactacgctgaatattttgtttacgtttttatttga

SEQ ID NO: 244 - protein, 316 aa, synthetic construct
IEGSGHHESVNSIATKILNFGHTCWKLQRPYVVKGMISIAAGLFGKELFNNPHLFSWGLMWKAFFALVPILSFNFFAAIMNQIYDVDIDRINKPDLPLVSGEMSIETAWILSIIVALTGLIVTIKLKSAPLFVGIYIFGIFAGFAYSVPPIRLKQYPFTNFLITISSHVGLAFTTYTATTSALGLPFVWRPAFSFIIAFMTVMGGTIAFAKDISDIEGDAKYGVSTVATKLGARNMTFVVSGVLLLNYAVAISIGIIWPQVFKSNIMILSHAILAFCLIRRTRELALANYESAPSRQFFEFIWLLYYAEYFVYVFI

SEQ ID NO: 245 - DNA, 951 bp, synthetic construct
  source 1..951: mol_type = other DNA
attgaaggttcaggtcatcatgaatctgataactcaatcgcaactaaaattttgaactttggtcatacatgttggaaattgcaaagaccatacgttgttaagggtatgatttctattgcttctggtttatttggtagagaattgtttaataacagacatttgttttcttggggtttgatgtggaaagcatttttcgcattagttccaatcttgtcttttaatttctttgctgcatgtatgaaccaaatatatgatgttgatattgatagaattaataagccagatttgccattggtttctggtgaaatgtcaatcgaaactgcttggattttatctatcatcgttgcattgactggtttgatcgttacaattaaattaaaatcagctccattgttcgtttttatatatatcttcggtatcttcgctggttttgcatactctgttccaccaattagattgaagcaatacccttttactaatttcttgatcacaatttcttcacatgttggtttggcttttactacttactcagctactacatctgcattaggtttgccatttgtttggaggccagctttttcttttattatcgcttttatgactgttatgggtggtacaatcgctttcgcaaaggatatctctgatattgaaggtgacgctaaatacggtgtttcaactgttgctacaaaattgggtgcaagaaacatgactttcgttgtttctggtgttttgttgttgaactatgctgttgctatctcaatcggtattatttggccacaagtttttaaatctaacatcatgatcttgtcacatgctatcttggcattcgctttgatcagacaaacaagagaattagctttggcaaattatgaatctgcaccatcaagacaatttttcgagtttatttggttgttgtactacgctgaatattttgttcccgtttttatttga

SEQ ID NO: 246 - protein, 316 aa, synthetic construct
IEGSGHHESDNSIATKILNFGHTCWKLQRPYVVKGMISIASGLFGRELFNNRHLFSWGLMWKAFFALVPILSFNFFAACMNQIYDVDIDRINKPDLPLVSGEMSIETAWILSIIVALTGLIVTIKLKSAPLFVFIYIFGIFAGFAYSVPPIRLKQYPFTNFLITISSHVGLAFTTYSATTSALGLPFVWRPAFSFIIAFMTVMGGTIAFAKDISDIEGDAKYGVSTVATKLGARNMTFVVSGVLLLNYAVAISIGIIWPQVFKSNIMILSHAILAFALIRQTRELALANYESAPSRQFFEFIWLLYYAEYFVPVFI

SEQ ID NO: 247 - DNA, 951 bp, synthetic construct
  source 1..951: mol_type = other DNA
attgaaggttcaggtcattgtgaatctgttaactcaatcgcaactaaaattttgaactttggtcatacatgttggaaattgcaaagaccatacgttgttaagggtatgatttctattgctgctggtttatttggtagagaattgtttaataacccacatttgttttcttggggtttgatgtggaaagcatttttcgcattagttccaatcttgtcttttaatttctttgctgcaatcatgaaccaaatatatgatgttgatattgatagaattaataagccagatttgccattggtttctggtgaaatgtcaatcgaaactgcttggattttatctatcatcgttgcattgactggtttgatcgttaaaatttggttaaaatcagctccattgttcgtttttatatatatcttcggtatcttcgctggttttgcatactctgttccaccaattagatggaagcaatacccttttactaatttcttgatcacaatttcttcacatgttggtttggcttttacttcttactcagctactacatctgcattaggtttgccatttgtttggaggccagctttttcttttattatcgcttttatgactgttatgggtatgacaatcgctttcgcaaaggatatctctgatattgaaggtgacgctaaatacggtgtttcaactgttgctacaaaattgggtgcaagaaacatgactttcgttgtttctggtgttttgttgttgaactatttggtttctatctcaatcggtattatttggccacaagtttttaaatctaacatcatgatcttgtcacatgctatcttggcattctgtttgatcttccaaacaagagaattagctttggcaaattatgcttctgcaccatcaagacaatttttcgagtttatttggttgttgtactacgctgaatattttgtttacgtttttatttga

SEQ ID NO: 248 - protein, 316 aa, synthetic construct
IEGSGHCESVNSIATKILNFGHTCWKLQRPYVVKGMISIAAGLFGRELFNNPHLFSWGLMWKAFFALVPILSFNFFAAIMNQIYDVDIDRINKPDLPLVSGEMSIETAWILSIIVALTGLIVKIWLKSAPLFVFIYIFGIFAGFAYSVPPIRWKQYPFTNFLITISSHVGLAFTSYSATTSALGLPFVWRPAFSFIIAFMTVMGMTIAFAKDISDIEGDAKYGVSTVATKLGARNMTFVVSGVLLLNYLVSISIGIIWPQVFKSNIMILSHAILAFCLIFQTRELALANYASAPSRQFFEFIWLLYYAEYFVYVFI

SEQ ID NO: 249 - DNA, 951 bp, synthetic construct
  source 1..951: mol_type = other DNA
attgaaggttcaggtcatcatgaatctgttaactcaatcgcaactaaaattttgaactttggtcatacatgttggaaattgcaaagaccatacgttgttaagggtatgatttctattgctgctggtttatttggtaaagaattgtttaataacagacatttgttttcttggggtttgatgtggaaagcatttttcgcattagttccaatcttgtcttttaatttctttgctgcaatcatgaaccaaatatatgatgttgatattgatagaattaataagccagatttgccattggtttctggtgaaatgtcaatcgaaactgcttggattttatctatcatcgttgcattgactggtttgatcgttacaatttggttaaaatcagctccattgttcgttggtatatatatcttcggtatcttcgctggttttgcatactctgttccaccaattagattgaagcaatacccttttactaatttcttgatcacaatttcttcacatgttggtttggcttttactgtttacactgctactagatctgcattaggtttgccatttgtttggaggccagctttttcttttattatcgcttttatgactgttatgtctggtacaatcgctttcgcaaaggatatctctgatattgaaggtgacgctaaatacggtgtttcaactgttgctacaaaattgggtgcaagaaacatgactttcgttgtttctggtgttttgttgttgaactatttggtttctatcccaatcggtattatttggccacaagtttttaaatctaacatcatgatcttgtcacatgctatcttggcattctgtttgatcagacaaacaagagaattagctttggcaaattatgaatctgcaccagctagacaatttttcgagtttatttggttgttgtactacgctgaatattttgtttacgtttccatttga

SEQ ID NO: 250 - protein, 316 aa, synthetic construct
IEGSGHHESVNSIATKILNFGHTCWKLQRPYVVKGMISIAAGLFGKELFNNRHLFSWGLMWKAFFALVPILSFNFFAAIMNQIYDVDIDRINKPDLPLVSGEMSIETAWILSIIVALTGLIVTIWLKSAPLFVGIYIFGIFAGFAYSVPPIRLKQYPFTNFLITISSHVGLAFTVYTATRSALGLPFVWRPAFSFIIAFMTVMSGTIAFAKDISDIEGDAKYGVSTVATKLGARNMTFVVSGVLLLNYLVSIPIGIIWPQVFKSNIMILSHAILAFCLIRQTRELALANYESAPARQFFEFIWLLYYAEYFVYVSI

SEQ ID NO: 251 - DNA, 951 bp, synthetic construct
  source 1..951: mol_type = other DNA
attgaaggttcaccacattgtgaatctgataactcaatcgcaactaaaattttgaactttggtcatacatgttggaaattgcaaagaccatacgttgttaagggtatgatttctattgctgctggtttatttggtagagaattgttgaataacagacatttgttttcttggggtttgatgtggaaagcatttttcgcattagttccaatcttgtcttttaatttctttgctgcatgtatgaaccaaatatatgatgttgatattgatagaattaataagccagatttgccattggtttctggtgaaatgtcaatcgaaactgcttggattttatctatcatcgttgcattgactggtttgatcgttacaatttggttaaaatcagctccattgttcgtttttatatatatcttcggtatcttcgctggttttgcatactctgttccaccaattagattgaagcaatacccttttactaatttcttgatcacaatttcttcacatgttggtttggcttttacttcttacactgctactacatctgcattaggtttgccatttgtttggaggccagctttttcttttattatcgcttttatgactgttatgggtatgacaatcgctttcgcaaaggatatctctgatattgaaggtgacgctaaatacggtgtttcaactgttgctacaaaattgggtgcaagaaacatgactttcgttgtttctggtgttttgttgttgaactatttggtttctatctcaatcggtattatttggccacaagtttttaaatctaacatcatgatcttgtcacatgctatcttggcattctgtttgatcttccaaacaagagaattagctttggcaaattatgcttctgcaccatcaagacaatttttcgagtttatttggttgttgtactacgctgaatattttgtttacgtttttatttga

SEQ ID NO: 252 - protein, 316 aa, synthetic construct
IEGSPHCESDNSIATKILNFGHTCWKLQRPYVVKGMISIAAGLFGRELLNNRHLFSWGLMWKAFFALVPILSFNFFAACMNQIYDVDIDRINKPDLPLVSGEMSIETAWILSIIVALTGLIVTIWLKSAPLFVFIYIFGIFAGFAYSVPPIRLKQYPFTNFLITISSHVGLAFTSYTATTSALGLPFVWRPAFSFIIAFMTVMGMTIAFAKDISDIEGDAKYGVSTVATKLGARNMTFVVSGVLLLNYLVSISIGIIWPQVFKSNIMILSHAILAFCLIFQTRELALANYASAPSRQFFEFIWLLYYAEYFVYVFI

SEQ ID NO: 253 - DNA, 951 bp, synthetic construct
  source 1..951: mol_type = other DNA
attgaaggttcaggtcattgtgaatctgataactcaatcgcaactaaaattttgaactttggtcatacatgttggaaattgcaaagaccatacgttgttaagggtatgatttctattgctgctggtttatttggtagagaattgtttaataacagacatttgttttcttggggtttgatgtggaaagcatttttcgcattagttccaatcttgtcttttaatttctttgctgcaatcatgaaccaaatatatgatgttgatattgatagaattaataagccagatttgccattggtttctggtgaaatgtcaatcgaaactgcttggattttatctatcatcgttgcattgactggtttgatcgttacaattaaattaaaatcagctccattgttcgtttttatatatatcttcggtatcttcgctggttttgcatactctgttccaccaattagatggaagcaatacccttttactaatttcttgatcacaatttcttcacatgttggtttggcttttacttcttacgctgctactagatctgcattaggtttgccatttgtttggaggccagctttttcttttattatcgcttttatgactgttatgggtggtacaatcgctttcgcaaaggatatctctgatattgaaggtgacgctaaatacggtgtttcaactgttgctacaaaattgggtgcaagaaacatgactttcgttgtttctggtgttttgttgttgaactatgctgttgctatctcaatcggtattatttggccacaagtttttaaatctaacatcatgatcttgtcacatgctatcttggcattcgctttgatcttccaaacaagagaattagctttggcaaattatgaatctgcaccagctagacaatttttagagtttatttggttgttgtactacgctgaatattttgtttacgtttttatttga

SEQ ID NO: 254 - protein, 316 aa, synthetic construct
IEGSGHCESDNSIATKILNFGHTCWKLQRPYVVKGMISIAAGLFGRELFNNRHLFSWGLMWKAFFALVPILSFNFFAAIMNQIYDVDIDRINKPDLPLVSGEMSIETAWILSIIVALTGLIVTIKLKSAPLFVFIYIFGIFAGFAYSVPPIRWKQYPFTNFLITISSHVGLAFTSYAATRSALGLPFVWRPAFSFIIAFMTVMGGTIAFAKDISDIEGDAKYGVSTVATKLGARNMTFVVSGVLLLNYAVAISIGIIWPQVFKSNIMILSHAILAFALIFQTRELALANYESAPARQFLEFIWLLYYAEYFVYVFI

SEQ ID NO: 255 - DNA, 951 bp, synthetic construct
  source 1..951: mol_type = other DNA
attgaaggttcaccacattgtgaatctgttaactcaatcgcaactaaaattttgaactttggtcatacatgttggaaattgcaaagaccatacgttgttaagggtatgatttctattgcttctggtttatttggtagagaattgtttaataacagacatttgttttcttggggtttgatgtggaaagcaactttcgcattagttccaatcttgtcttttaatttctttgctgcaatcatgaaccaaatatatgatgttgatattgatagaattaataagccagatttgccattggtttctggtgaaatgtcaatcgaaactgcttggattttatctatcatcgttgcattgactggtttgatcgttacaattaaattaaaatcagctccattgttcgtttttatatatatcttcggtatcttcgctggttttgcatactctgttccaccaattagatggaagcaatacccttttactaatttcttgatcacaatttcttcacatgttggtttggcttttacttcttacgctgctactacatctgcattaggtttgccatttgcttggaggccagctttttcttttattatcgcttttatgactgttatgggtggtacaatcgctttcgcaaaggatatctctgatattgaaggtgacgctaaatacggtgtttcaactgttgctacaaaattgggtgcaagaaacatgactttcgttgtttctggtgttttgttgttgaactatgctgttgctatctcaatcggtattatttggccacaagtttttaaatctaacatcatgatcttgtcacatgctatcttggcattctgtttgatcttccaaacaagagaattagctttggcaaattatgaatctgcaccagctagacaatttttcgagtttatttggttgttgtactacgctgaatattttgtttacgtttttatttga

SEQ ID NO: 256 - protein, 316 aa, synthetic construct
IEGSPHCESVNSIATKILNFGHTCWKLQRPYVVKGMISIASGLFGRELFNNRHLFSWGLMWKATFALVPILSFNFFAAIMNQIYDVDIDRINKPDLPLVSGEMSIETAWILSIIVALTGLIVTIKLKSAPLFVFIYIFGIFAGFAYSVPPIRWKQYPFTNFLITISSHVGLAFTSYAATTSALGLPFAWRPAFSFIIAFMTVMGGTIAFAKDISDIEGDAKYGVSTVATKLGARNMTFVVSGVLLLNYAVAISIGIIWPQVFKSNIMILSHAILAFCLIFQTRELALANYESAPARQFFEFIWLLYYAEYFVYVFI

SEQ ID NO: 257 - DNA, 951 bp, synthetic construct
  source 1..951: mol_type = other DNA
attgaaggttcaccacattgtgaatctgttaactcaatcgcaactaaaattttgaactttggtcatacatgttggaaattgcaaagaccatacgttgttaagggtatgatttctattgcttgtggtttatttggtaaagaattgtttaataacagacatttgttttcttggggtttgatgtggaaagcatttttcgcattagttccaatcttgtcttttaatttctttgctgcaatcatgaaccaaatatatgatgttgatattgatagaattaataagccagatttgccattggtttctggtgaaatgtcaatcgaaactgcttggattttatctatcatcgttgcattgactggtttgatcgttacaattaaattaaaatcagctccattgttcgttgttatatatatcttcggtatcttcgctggttttgcatactctgttccaccaattagatggaagcaatacccttttactaatttcttgatcacaatttcttcacatgttggtttggcttttacttcttactcagctactacatctgcattaggtttgccatttgtttggaggccagctttttcttttattatcgcttttatgactgttatgggtatgacaatcgctttcgcaaaggatatctctgatattgaaggtgacgctaaatacggtgtttcaactgttgctacaaaattgggtgcaagaaacatgactttcgttgtttctggtgttttgttgttgaactatttggtttctatctcaatcggtattatttggccacaagtttttaaatctaacatcatgatcttgtcacatgctatcttggcattctgtttgatcttccaaacaagagaattagctttggcaaattatgcttctgcaccatcaagacaatttttcgagtttatttggttgttgtactacgctgaatattttgtttacgtttttatttga

SEQ ID NO: 258 - protein, 316 aa, synthetic construct
IEGSPHCESVNSIATKILNFGHTCWKLQRPYVVKGMISIACGLFGKELFNNRHLFSWGLMWKAFFALVPILSFNFFAAIMNQIYDVDIDRINKPDLPLVSGEMSIETAWILSIIVALTGLIVTIKLKSAPLFVVIYIFGIFAGFAYSVPPIRWKQYPFTNFLITISSHVGLAFTSYSATTSALGLPFVWRPAFSFIIAFMTVMGMTIAFAKDISDIEGDAKYGVSTVATKLGARNMTFVVSGVLLLNYLVSISIGIIWPQVFKSNIMILSHAILAFCLIFQTRELALANYASAPSRQFFEFIWLLYYAEYFVYVFI

SEQ ID NO: 259 - DNA, 951 bp, synthetic construct
  source 1..951: mol_type = other DNA
attgaaggttcaggtcattgtgaatctgataactcaatcgcaactaaaattttgaactttggtcatacatgttggaaattgcaaagaccatacgttgttaagggtatgatttctattgcttgtggtttatttggtagagaattgttgaataacagacatttgttttcttggggtttgatgtggaaagcaactttcgcattagttccaatcttgtcttttaatttctttgctgcatgtatgaaccaaatatatgatgttgatattgatagaattaataagccagatttgccattggtttctggtgaaatgtcaatcgaaactgcttggattttatctatcatcgttgcattgactggtttgatcgttacaatttggttaaaatcagctccattgttcgtttttatatatatcttcggtatcttcgctggttttgcatactctgttccaccaattagattgaagcaatacccttttactaatttcttgatcacaatttcttcacatgttggtttggcttttactacttactcagctactacatctgcattaggtttgccatttgtttggaggccagcttttttgtttattatcgcttttatgactgttatgggtatgacaatcgctttcgcaaaggatatctctgatattgaaggtgacgctaaatacggtgtttcaactgttgctacaaaattgggtgcaagaaacatgactttcgttgtttctggtgttttgttgttgaactatttggtttctatctcaatcggtattatttggccacaagtttttaaatctaacatcatgatcttgtcacatgctatcttggcattcatgttgatcagaagaacaagagaattagctttggcaaattatgaatctgcaccagctagacaatttttcgagtttatttggttgttgtactacgctgaatattttgtttacgtttttatttga

SEQ ID NO: 260 - protein, 316 aa, synthetic construct
IEGSGHCESDNSIATKILNFGHTCWKLQRPYVVKGMISIACGLFGRELLNNRHLFSWGLMWKATFALVPILSFNFFAACMNQIYDVDIDRINKPDLPLVSGEMSIETAWILSIIVALTGLIVTIWLKSAPLFVFIYIFGIFAGFAYSVPPIRLKQYPFTNFLITISSHVGLAFTTYSATTSALGLPFVWRPAFLFIIAFMTVMGMTIAFAKDISDIEGDAKYGVSTVATKLGARNMTFVVSGVLLLNYLVSISIGIIWPQVFKSNIMILSHAILAFMLIRRTRELALANYESAPARQFFEFIWLLYYAEYFVYVFI

SEQ ID NO: 261 - DNA, 951 bp, synthetic construct
  source 1..951: mol_type = other DNA
attgaaggttcaggtcatcatgaatctgttaactcaatcgcaactaaaattttgaactttggtcatacatgttggaaattgcaaagaccatacgttgttaagggtatgatttctattgcttgtggtttatttggtagagaattgtttaataacagacatttgttttcttggggtttgatgtggaaagcaactttcgcattagttccaatcttgtcttttaatttctttgctgcaatcatgaaccaaatatatgatgttgatattgatagaattaataagccagatttgccattggtttctggtgaaatgtcaatcgaaactgcttggattttatctatcatcgttgcattgactggtttgatcgttacaattaaattaaaatcagctccattgttcgttggtatatatatcttcggtatcttcgctggttttgcatactctgttccaccaattagatggaagcaatacccttttactaatttcttgatcacaatttcttcacatgttggtttggcttttactacttacactgctactagatctgcattaggtttgccatttgtttggaggccagctttttcttttattatcgcttttatgactgttatgggtatgacaatcgctttcgcaaaggatatctctgatattgaaggtgacgctaaatacggtgtttcaactgttgctacaaaattgggtgcaagaaacatgactttcgttgtttctggtgttttgttgttgaactatgctgttgctatctcaatcggtattatttggccacaagtttttaaatctaacatcatgatcttgtcacatgctatcttggcattctgtttgatcttccaaacaagagaattagctttggcaaattatgaatctgcaccatcaagacaatttttcgagtttatttggttgttgtactacgctgaatattttgtttacgtttttatttga

SEQ ID NO: 262 - protein, 316 aa, synthetic construct
IEGSGHHESVNSIATKILNFGHTCWKLQRPYVVKGMISIACGLFGRELFNNRHLFSWGLMWKATFALVPILSFNFFAAIMNQIYDVDIDRINKPDLPLVSGEMSIETAWILSIIVALTGLIVTIKLKSAPLFVGIYIFGIFAGFAYSVPPIRWKQYPFTNFLITISSHVGLAFTTYTATRSALGLPFVWRPAFSFIIAFMTVMGMTIAFAKDISDIEGDAKYGVSTVATKLGARNMTFVVSGVLLLNYAVAISIGIIWPQVFKSNIMILSHAILAFCLIFQTRELALANYESAPSRQFFEFIWLLYYAEYFVYVFI

SEQ ID NO: 263 - DNA, 951 bp, synthetic construct
  source 1..951: mol_type = other DNA
attgaaggttcaggtcattgtgaatctgttaactcaatcgcaactaaaattttgaactttggtcatacatgttggaaattgcaaagaccatacgttgttaagggtatgatttctattgcttgtggtttatttggtagagaattgtttaataacagacatttgttttcttggggtttgatgtggaaagcatttttcgcattagttccaatcttgtcttttaatttctttgctgcagctatgaaccaaatatatgatgttgatattgatagaattaataagccagatttgccattggtttctggtgaaatgtcaatcgaaactgcttggattttatctatcatcgttgcattgactggtttgatcgttacaatttggttaaaatcagctccattgttcgtttttatatatatcttcggtatcttcgctggttttgcatactctgttccaccaattagattgaagcaatacccttttactaatttcttgatcacaatttcttcacatgttggtttggcttttacttcttactcagctactacatctgcattaggtttgccatttgtttggaggccagctttttcttttattatcgcttttatgactgttatgggtatgacaatcgctttcgcaaaggatatctctgatattgaaggtgacgctaaatacggtgtttcaactgttgctacaaaattgggtgcaagaaacatgactttcgttgtttctggtgttttgttgttgaactatttggtttctatctcaatcggtattatttggccacaagtttttaagtctaacatcatgatcttgtcacatgctatcttggcattctgtttgatcttccaaacaagaaaattagctttggcaaattatgaatctgcaccatcaagacaatttttcgagtttatttggttgttgtactacgctgaatattttgtttacgtttttatttga

SEQ ID NO: 264 - protein, 316 aa, synthetic construct
IEGSGHCESVNSIATKILNFGHTCWKLQRPYVVKGMISIACGLFGRELFNNRHLFSWGLMWKAFFALVPILSFNFFAAAMNQIYDVDIDRINKPDLPLVSGEMSIETAWILSIIVALTGLIVTIWLKSAPLFVFIYIFGIFAGFAYSVPPIRLKQYPFTNFLITISSHVGLAFTSYSATTSALGLPFVWRPAFSFIIAFMTVMGMTIAFAKDISDIEGDAKYGVSTVATKLGARNMTFVVSGVLLLNYLVSISIGIIWPQVFKSNIMILSHAILAFCLIFQTRKLALANYESAPSRQFFEFIWLLYYAEYFVYVFI

SEQ ID NO: 265 - DNA, 951 bp, synthetic construct
  source 1..951: mol_type = other DNA
attgaaggttcaggtcatcatgaatctgttaactcaatcgcaactaaaattttgaactttggtcatacatgttggaaattgcaaagaccatacgttgttaagggtatgatttctattgcttgtggtttatttggtagagaattgttgaataacccacatttgttttcttggggtttgatgtggaaagcatttttcgcattagttccaatcttgtcttttaatttctttgctgcaatcatgaaccaaatatatgatgttgatattgatagaattaataagccagatttgccattggtttctggtgaaatgtcaatcgaaactgcttggattttatctatcatcgttgcattgactggtttgatcgttacaattaaattaaaatcagctccattgttcgttggtatatatatcttcggtatcttcgctggttttgcatactctgttccaccaattagatggaagcaatacccttttactaatttcttgatcacaatttcttcacatgttggtttggcttttacttcttactcagctactacatctgcattaggtttgccatttgtttggaggccagcttttttgtttattatcgcttttatgactgttatgggtatgacaatcgctttcgcaaaggatatctctgatattgaaggtgacgctaaatacggtgtttcaactgttgctacaaaattgggtgcaagaaacatgactttcgttgtttctggtgttttgttgttgaactatttggttgctatctcaatcggtattattcggccacaagtttttaaatctaacatcatgatcttgtcacatgctatcttggcattctgtttgatcttcagaacaagagaattagctttggcaaattatgaatctgcaccagctagacaatttttcgagtttatttggttgttgtactacgctgaatattttgtttacgtttttatttga

SEQ ID NO: 266 - protein, 316 aa, synthetic construct
IEGSGHHESVNSIATKILNFGHTCWKLQRPYVVKGMISIACGLFGRELLNNPHLFSWGLMWKAFFALVPILSFNFFAAIMNQIYDVDIDRINKPDLPLVSGEMSIETAWILSIIVALTGLIVTIKLKSAPLFVGIYIFGIFAGFAYSVPPIRWKQYPFTNFLITISSHVGLAFTSYSATTSALGLPFVWRPAFLFIIAFMTVMGMTIAFAKDISDIEGDAKYGVSTVATKLGARNMTFVVSGVLLLNYLVAISIGIIRPQVFKSNIMILSHAILAFCLIFRTRELALANYESAPARQFFEFIWLLYYAEYFVYVFI

SEQ ID NO: 267 - DNA, 951 bp, synthetic construct
  source 1..951: mol_type = other DNA
attgaaggttcaccacattgtgaatctgttaactcaatcgcaactaaaattttgaactttggtcatacatgttggaaattgcaaagaccatacgttgttaagggtatgatttctattgcttctggtttatttggtagagaattgtttaataacagacatttgttttcttggggtttgatgtggaaagcatttttcgcattagttccaatcttgtcttttaatttctttgctgcatgtatgaaccaaatatatgatgttgatattgatagaattaataagccagatttgccattggtttctggtgaaatgtcaatcgaaactgcttggattttatctatcatcgttgcattgactggtttgatcgttacaattaaattaaaatcagctccattgttcgttggtatatatatcttcggtatcttcgctggttttgcatactctgttccaccaattagatggaagcaatacccttttactaatttcttgatcacaatttcttcacatgttggtttggcttttacttcttactcagctactacatctgcattaggtttgccatttgcttggtctccagctttttcttttattatcgcttttatgactgttatgggtatgacaatcgctttcgcaaaggatatctgtgatattgaaggtgacgctaaatacggtgtttcaactgttgctacaaaattgggtgcaagaaacatgactttcgttgtttctggtgttttgttgttgaactatttggtttctatctcaatcggtattatttggccacaagtttttaaatctaacatcatgatcttgtcacatgctatcttggcattctgtttgatcttccaaacaagagaattagctttggcaaattatgaatctgcaccagctagacaatttttcgagtttatttggttgttgtattacgctgaatattcggtctacgtttttatttga

SEQ ID NO: 268 - protein, 316 aa, synthetic construct
IEGSPHCESVNSIATKILNFGHTCWKLQRPYVVKGMISIASGLFGRELFNNRHLFSWGLMWKAFFALVPILSFNFFAACMNQIYDVDIDRINKPDLPLVSGEMSIETAWILSIIVALTGLIVTIKLKSAPLFVGIYIFGIFAGFAYSVPPIRWKQYPFTNFLITISSHVGLAFTSYSATTSALGLPFAWSPAFSFIIAFMTVMGMTIAFAKDICDIEGDAKYGVSTVATKLGARNMTFVVSGVLLLNYLVSISIGIIWPQVFKSNIMILSHAILAFCLIFQTRELALANYESAPARQFFEFIWLLYYAEYSVYVFI

SEQ ID NO: 269 - DNA, 951 bp, synthetic construct
  source 1..951: mol_type = other DNA
attgaaggttcaccacatcatgaatctgataactcaatcgcaactaaaattttgaactttggtcatacatgttggaaattgcaaagaccatacgttgttaagggtatgatttctattgctgctggtttatttggtagagaattgtttaataacagacatttgttttcttggggtttgatgtggaaagcatttttcgcattagttccaatcttgtcttttaatttctttgctgcagctatgaaccaaatatatgatgttgatattgatagaattaataagccagatttgccattggtttctggtgaaatgtcaatcgaaactgcttggattttatctatcatcgttgcattgactggtttgatcgttacaatttggttaaaatcagctccattgttcgttggtatatatatcttcggtatcttcgctggttttgcatactctgttccaccaattagattgaagcaatacccttttactaatttcttgatcacaatttcttcacatgttggtttggcttttactacttacactgctactagatctgcattaggtttgccatttgtttggaggccagctttttcttttattatcgcttttatgactgttatgggtatgacaatcgctttcgcaaaggatatctctgatattgaaggtgacgctaaatacggtgtttcaactgttgctacaaaattgggtgcaagaaacatgactttcgttgtttctggtgttttgttgttgaactatttggtttctatctcaatcggtattatttggccacaagtttttaaatctaacatcatgatcttgtcacatgctatcttggcattctgtttgatcttccaaacaagagaattagctttggcaaattatgcttctgcaccatcaagacaatttttcgagtttatttggttgttgtactacgctgaatattttgtttacgtttttatttga

SEQ ID NO: 270 - protein, 316 aa, synthetic construct
IEGSPHHESDNSIATKILNFGHTCWKLQRPYVVKGMISIAAGLFGRELFNNRHLFSWGLMWKAFFALVPILSFNFFAAAMNQIYDVDIDRINKPDLPLVSGEMSIETAWILSIIVALTGLIVTIWLKSAPLFVGIYIFGIFAGFAYSVPPIRLKQYPFTNFLITISSHVGLAFTTYTATRSALGLPFVWRPAFSFIIAFMTVMGMTIAFAKDISDIEGDAKYGVSTVATKLGARNMTFVVSGVLLLNYLVSISIGIIWPQVFKSNIMILSHAILAFCLIFQTRELALANYASAPSRQFFEFIWLLYYAEYFVYVFI

SEQ ID NO: 271 - DNA, 951 bp, synthetic construct
  source 1..951: mol_type = other DNA
attgaaggttcaggtcattgtgaatctgataactcaatcgcaactaaaattttgaactttggtcatacatgttggaaattgcaaagaccatacgttgttaagggtatgatttctattgcttgtggtttatttggtagagaattgtttaataacagacatttgttttcttggggtttgatgtggaaagcatttttcgcattagttccaatcttgtcttttaatttctttgctgcagctatgaaccaaatatatgatgttgatattgatagaattaataagccagatttgccattggtttctggtgaaatgtcaatcgaaactgcttggattttatctatcatcgttgcattgactggtttgatcgttacaattaaattaaaatcagctccattgttcgtttttatatatatcttcggtatcttcgctggttttgcatactctgttccaccaattagatggaagcaatacccttttactaatttcttgatcacaatttcttcacatgttggtttggcttttactgtttacactgctactacatctgcattaggtttgccatttgtttggaggccagctttttcttttattatcgcttttatgactgttatgggtatgacaatcgctttcgcaaaggatatctctgatattgaaggtgacgctaaatacggtgtttcaactgttgctacaaaattgggtgcaagaaacatgactttcgttgtttctggtgttttgttgttgaactatgctgttgctatctcaatcggtattattcggccacaagtttttaaatctaacatcatgatcttgtcacatgctatcttggcattctgtttgatcttcagaacaagagaattagctttggcaaattatgcttctgcaccatcaagacaatttttcgagtttatttggttgttgtactacgctgaatattttgtttacgtttttatttga

SEQ ID NO: 272 - protein, 316 aa, synthetic construct
IEGSGHCESDNSIATKILNFGHTCWKLQRPYVVKGMISIACGLFGRELFNNRHLFSWGLMWKAFFALVPILSFNFFAAAMNQIYDVDIDRINKPDLPLVSGEMSIETAWILSIIVALTGLIVTIKLKSAPLFVFIYIFGIFAGFAYSVPPIRWKQYPFTNFLITISSHVGLAFTVYTATTSALGLPFVWRPAFSFIIAFMTVMGMTIAFAKDISDIEGDAKYGVSTVATKLGARNMTFVVSGVLLLNYAVAISIGIIRPQVFKSNIMILSHAILAFCLIFRTRELALANYASAPSRQFFEFIWLLYYAEYFVYVFI

SEQ ID NO: 273 - DNA, 951 bp, synthetic construct
  source 1..951: mol_type = other DNA
attgaaggttcaccacattgtgaatctgttaactcaatcgcaactaaaattttgaactttggtcatacatgttggaaattgcaaagaccatacgttgttaagggtatgatttctattgctgctggtttatttggtaaagaattgtttaataacagacatttgttttcttggggtttgatgtggaaagcaactttcgcattagttccaatcttgtcttttaatttctttgctgcaatcatgaaccaaatatatgatgttgatattgatagaattaataagccagatttgccattggtttctggtgaaatgtcaatcgaaactgcttggattttatctatcatcgctgcattgactggtttgatcgttacaatttggttaaaatcagctccattgttcgtttttatatatatcttcggtatcttcgctggttttgcatactctgttccaccaattagatggaagcaatacccttttactaatttcttgatcacaatttcttcacatgttggtttggcttttacttcttactcagctactagatctgcattaggtttgccatttgtttggaggccagctttttcttttattatcgcttttatgactgttatgggtatgacaatcgctttcgcaaaggatatctctgatattgaaggtgacgctaaatacggtgtttcaactgttgctacaaaattgggtgcaagaaacatgactttcgttgtttctggtgttttgttgttgaactatttggtttctatctcaatcggtattatttggccacaagtttttaaatctaacatcatgatcttgtcacatgctatcttggcattcgctttgatcagacaaacaagagaattagctttggcaaattatgcttctgcaccagctagacaatttttcgagtttatttggttgttgtactacgctgaatattttgtttacgtttttatttga

SEQ ID NO: 274 - protein, 316 aa, synthetic construct
IEGSPHCESVNSIATKILNFGHTCWKLQRPYVVKGMISIAAGLFGKELFNNRHLFSWGLMWKATFALVPILSFNFFAAIMNQIYDVDIDRINKPDLPLVSGEMSIETAWILSIIAALTGLIVTIWLKSAPLFVFIYIFGIFAGFAYSVPPIRWKQYPFTNFLITISSHVGLAFTSYSATRSALGLPFVWRPAFSFIIAFMTVMGMTIAFAKDISDIEGDAKYGVSTVATKLGARNMTFVVSGVLLLNYLVSISIGIIWPQVFKSNIMILSHAILAFALIRQTRELALANYASAPARQFFEFIWLLYYAEYFVYVFI

SEQ ID NO: 275 - DNA, 951 bp, synthetic construct
  source 1..951: mol_type = other DNA
attgaaggttcaccacatcatgaatctgttaactcaatcgcaactaaaattttgaactttggtcatacatgttggaaattgcaaagaccatacgttgttaagggtatgatttctattgctgctggtttatttggtaaagaattgtttaataacccacatttgttttcttggggtttgatgtggaaagcaactttcgcattagttccaatcttgtcttttaatttctttgctgcaatcatgaaccaaatatatgatgttgatattgatagaattaataagccagatttgccattggtttctggtgaaatgtcaatcgaaactgcttggattttgtctatcatcgttgcattgactggtttgatcgttacaatttggttaaaatcagctccattgttcgttggtatatatatcttcggtatcttcgctggttttgcatactctgttccaccaattagattgaagcaatacccttttactaatttcttgatcacaatttcttcacatgttggtttggcttttacttcttacgctgctactagatctgcattaggtttgccatttgtttggaggccagctttttcttttattatcgcttttatgactgttatgggtatgacaatcgctttcgcaaaggatatctgtgatattgaaggtgacgctaaatacggtgtttcaactgttgctacaaaattgggtgcaagaaacatgactttcgttgtttctggtgttttgttgttgaactatgctgtttctatctcaatcggtattatttggccacaagtttttaaatctaacatcatgatcttgtcacatgctatcttggcattctgtttgatcttccaaacaagaaaattagctttggcaaattatgcttctgcaccagctagacaatttttcgagtttatttggttgttgtattaccctgaatattttgtttacgtttttatttga

SEQ ID NO: 276 - protein, 316 aa, synthetic construct
IEGSPHHESVNSIATKILNFGHTCWKLQRPYVVKGMISIAAGLFGKELFNNPHLFSWGLMWKATFALVPILSFNFFAAIMNQIYDVDIDRINKPDLPLVSGEMSIETAWILSIIVALTGLIVTIWLKSAPLFVGIYIFGIFAGFAYSVPPIRLKQYPFTNFLITISSHVGLAFTSYAATRSALGLPFVWRPAFSFIIAFMTVMGMTIAFAKDICDIEGDAKYGVSTVATKLGARNMTFVVSGVLLLNYAVSISIGIIWPQVFKSNIMILSHAILAFCLIFQTRKLALANYASAPARQFFEFIWLLYYPEYFVYVFI

SEQ ID NO: 277 - DNA, 951 bp, synthetic construct
  source 1..951: mol_type = other DNA
attgaaggttcaggtcatcatgaatctgttaactcaatcgcaactaaaattttgaactttggtcatacatgttggaaattgcaaagaccatacgttgttaagggtatgatttctattgctgctggtttatttggtaaagaattgtttaataacagacatttgttttcttggggtttgatgtggaaagcatttttcgcattagttccaatcttgtcttttaatttctttgctgcagctatgaaccaaatatatgatgttgatattgatagaattaataagccagatttgccattggtttctggtgaaatgtcaatcgaaactgcttggattttatctatcatcgttgcattgactggtttgatcgttacaattaaattaaaatcagctccattgttcgttggtatatatatcttcggtatcttcgctggttttgcatactctgttccaccaattagattgaagcaatacccttttactaatttcttgatcacaatttcttcacatgttggtttggcttttacttcttactcagctactacatctgcattaggtttgccatttgtttggaggccagctttttcttttattatcgcttttatgactgttatgggtatgacaatcgctttcgcaaaggatatctctgatattgaaggtgacgctaaatacggtgtttcaactgttgctacaaaattgggtgcaagaaacatgactttcgttgtttctggtgttttgttgttgaactatgctgtttctatctcaatcggtattatttggccacaagtttttaaatctaacatcatgatcttgtcacatgctatcttggcattctgtttgatcttcagaacaagagaattagctttggcaaattatgcttctgcaccagctagacaatttttcgagtttatttggttgttgtactacgctgaatattttgtttacgtttttatttga

SEQ ID NO: 278 - protein, 316 aa, synthetic construct
IEGSGHHESVNSIATKILNFGHTCWKLQRPYVVKGMISIAAGLFGKELFNNRHLFSWGLMWKAFFALVPILSFNFFAAAMNQIYDVDIDRINKPDLPLVSGEMSIETAWILSIIVALTGLIVTIKLKSAPLFVGIYIFGIFAGFAYSVPPIRLKQYPFTNFLITISSHVGLAFTSYSATTSALGLPFVWRPAFSFIIAFMTVMGMTIAFAKDISDIEGDAKYGVSTVATKLGARNMTFVVSGVLLLNYAVSISIGIIWPQVFKSNIMILSHAILAFCLIFRTRELALANYASAPARQFFEFIWLLYYAEYFVYVFI

SEQ ID NO: 279 - DNA, 951 bp, synthetic construct
  source 1..951: mol_type = other DNA
attgaaggttcaggtcattgtgaatctgataactcaatcgcaactaaaattttgaactttggtcatacatgttggaaattgcaaagaccatacgttgttaagggtatgatttctattgcttgtggtttatttggtaaagaattgtttaataacagacatttgttttcttggggtttgatgtggaaagcatttttcgcattagttccaatcttgtcttttaatttctttgctgcaatcatgaaccaaatatatgatgttgatattgatagaattaataagccagatttgccattggtttctggtgaaatgtcaatcgaaactgcttggattttatctatcatcgttgcattgactggtttgatcgttacaatttggttaaaatcagctccattgttcgtttttatatatatcttcggtatcttcgctggttttgcatactctgttccaccaattagatggaagcaatacccttttactaatttcttgatcacaatttcttcacatgttggtttggcttttactgtttacactgctactagatctgcattaggtttgccatttgtttggaggccagctttttcttttattatcgcttttatgactgttatgggtggtacaatcgctttcgcaaaggatatctctgatattgaaggtgacgctaaatacggtgtttcaactgttgctacaaaattgggtgcaagaaacatgactttcgttgtttctggtgttttgttgttgaactatgctgtttctatctcaatcggtattatttggccacaagtttttaaatctaacatcatgatcttgtcacatgctatcttggcattctgtttgatcttccaaacaagaaaattagctttggcaaattatgcttctgcaccagctagacaatttttcgagtttatttggttgttgtactacgctgaatattttgtttacgtttttatttga

SEQ ID NO: 280 - protein, 316 aa, synthetic construct
IEGSGHCESDNSIATKILNFGHTCWKLQRPYVVKGMISIACGLFGKELFNNRHLFSWGLMWKAFFALVPILSFNFFAAIMNQIYDVDIDRINKPDLPLVSGEMSIETAWILSIIVALTGLIVTIWLKSAPLFVFIYIFGIFAGFAYSVPPIRWKQYPFTNFLITISSHVGLAFTVYTATRSALGLPFVWRPAFSFIIAFMTVMGGTIAFAKDISDIEGDAKYGVSTVATKLGARNMTFVVSGVLLLNYAVSISIGIIWPQVFKSNIMILSHAILAFCLIFQTRKLALANYASAPARQFFEFIWLLYYAEYFVYVFI

SEQ ID NO: 281 - DNA, 951 bp, synthetic construct
  source 1..951: mol_type = other DNA
attgaaggttcaccacatcatgaatctgttaactcaatcgcaactaaaattttgaactttggtcatacatgttggaaattgcaaagaccatacgttgttaagggtatgatttctattgcttctggtttatttggtaaagaattgtttaataacagacatttgttttcttggggtttgatgtggaaagcatttctcgcattagttccaatcttgtcttttaatttctttgctgcaatcatgaaccaaatatatgatgttgatattgatagaattaataagccagatttgccattggtttctggtgaaatgtcaatcgaaactgcttggattttatctatcatcgttgcattgactggtttgatcgttacaatttggttaaaatcagctccattgttcgtttttatatatatcttcggtatcttcgctggttttgcatactctgttccaccaattagattgaagcaatacccttttactaatttcttgatcacaatttcttcacatgttggtttggcttttacttcttacgctgctactagatctgcattaggtttgccatttgtttggaggccagcttttttgtttattatcgcttttatgactgttatgggtatgacaatcgctttcgcaaaggatatctctgatattgaaggtgacgctaaatacggtgtttcaactgttgctacaaaattgggtgcaagaaacatgactttcgttgtttctggtgttttgttgttgaactatgctgttgctatctcaatcggtattatttggccacaagtttttaaatctaacatcatgatcttgtcacatgctatcttggcattcgctttgatcttccaaacaagagaattagctttggcaaattatgcttctgcaccatcaagacaatttttcgagtttatttggttgttgtactacgctgaatattttgtttacgtttttatttga

SEQ ID NO: 282 - protein, 316 aa, synthetic construct
IEGSPHHESVNSIATKILNFGHTCWKLQRPYVVKGMISIASGLFGKELFNNRHLFSWGLMWKAFLALVPILSFNFFAAIMNQIYDVDIDRINKPDLPLVSGEMSIETAWILSIIVALTGLIVTIWLKSAPLFVFIYIFGIFAGFAYSVPPIRLKQYPFTNFLITISSHVGLAFTSYAATRSALGLPFVWRPAFLFIIAFMTVMGMTIAFAKDISDIEGDAKYGVSTVATKLGARNMTFVVSGVLLLNYAVAISIGIIWPQVFKSNIMILSHAILAFALIFQTRELALANYASAPSRQFFEFIWLLYYAEYFVYVFI

SEQ ID NO: 283 - DNA, 951 bp, synthetic construct
  source 1..951: mol_type = other DNA
attgaaggttcaccacatcatgaatctgataactcaatcgcaactaaaattttgaactttggtcatacatgttggaaattgcaaagaccatacgttgttaagggtatgatttctattgctgctggtttatttggtaaagaattgtttaataacagacatttgttttcttggggtttgatgtggaaagcatttttcgcattagttccaatcttgtcttttaatttctttgctgcatgtatgaaccaaatatatgatgttgatattgatagaattaataacccagatttgccattggtttctggtgaaatgtcaatcgaaactgcttggattttatctatcatcgttgcattgactggtttgatcgttacaatttggttaaaatcagctccattgttcgtttttatatatatcttcggtatcttcgctggttttgcatactctgttccaccaattagatggaagcaatacccttttactaatttcttgatcacaatttcttcacatgttggtttggcttttacttcttactcagctactacatctgcattaggtttgccatttgtttggaggccagctttttcttttattatcgcttttatgactgttatgggtatgacaatcgctttcgcaaaggatatctctgatattgaaggtgacgctaaatacggtgtttcaactgttgctacaaaattgggtgcaagaaacatgactttcgttgtttctggtgttttgttgttgaactatttggtttctatctcaatcggtattatttggccacaagtttttaaatctaacatcatgatcttgtcacatgctatcttggcattctgtttgatcttccaaacaagagaattagctttggcaaattatgcttctgcaccatcaagacaatttttcgagtttatttggttgttgtactacgctgaatattttgtttacgtttttatttga

SEQ ID NO: 284 - protein, 316 aa, synthetic construct
IEGSPHHESDNSIATKILNFGHTCWKLQRPYVVKGMISIAAGLFGKELFNNRHLFSWGLMWKAFFALVPILSFNFFAACMNQIYDVDIDRINNPDLPLVSGEMSIETAWILSIIVALTGLIVTIWLKSAPLFVFIYIFGIFAGFAYSVPPIRWKQYPFTNFLITISSHVGLAFTSYSATTSALGLPFVWRPAFSFIIAFMTVMGMTIAFAKDISDIEGDAKYGVSTVATKLGARNMTFVVSGVLLLNYLVSISIGIIWPQVFKSNIMILSHAILAFCLIFQTRELALANYASAPSRQFFEFIWLLYYAEYFVYVFI

SEQ ID NO: 285 - DNA, 951 bp, synthetic construct
  source 1..951: mol_type = other DNA
attgaaggttcaggtcattgtgaatctgataactcaatcgcaactaaaattttgaactttggtcatacatgttggaaattgcaaagaccatacgttgttaagggtatgatttctattgcttgtggtttatttggtagagaattgtttaataacccacatttgttttcttggggtttgatgtggaaagcatttttcgcattagttccaatcttgtcttttaatttctttgctgcatgtatgaaccaaatatatgatgttgatattgatagaattaataagccagatttgccattggtttctggtgaaatgtcaatcgaaactgcttggattttatctatcatcgttgcattgactggtttgatcgttacaatttggttaaaatcagctccattgttcgtttttatatatatcttcggtatcttcgctggttttgcatactctgttccaccaattagattgaagcaatacccttttactaatttcttgatcacaatttcttcacatgttggtttggcttttacttcttacactgctactagatctgcattaggtttgccatttgtttggaggccagcttttttgtttattatcgcttttatgactgttatgggtatgacaatcgctttcgcaaaggatatctctgatattgaaggtgacgctaaatacggtgtttcaactgttgctacaaaattgggtgcaagaaacatgactttcgttgtttctggtgttttgttgttgaactatttggtttctatctcaatcggtattatttggccacaagtttttaaatctaacatcatgatcttgtcacatgctatcttggcattctgtttgatcttccaaacaagagaattagctttggcaaattatgcttctgcaccatcaagacaatttttcgagtttatttggttgttgtactacgctgaatattttgtttacgtttttatttga

SEQ ID NO: 286 - protein, 316 aa, synthetic construct
IEGSGHCESDNSIATKILNFGHTCWKLQRPYVVKGMISIACGLFGRELFNNPHLFSWGLMWKAFFALVPILSFNFFAACMNQIYDVDIDRINKPDLPLVSGEMSIETAWILSIIVALTGLIVTIWLKSAPLFVFIYIFGIFAGFAYSVPPIRLKQYPFTNFLITISSHVGLAFTSYTATRSALGLPFVWRPAFLFIIAFMTVMGMTIAFAKDISDIEGDAKYGVSTVATKLGARNMTFVVSGVLLLNYLVSISIGIIWPQVFKSNIMILSHAILAFCLIFQTRELALANYASAPSRQFFEFIWLLYYAEYFVYVFI

SEQ ID NO: 287 - DNA, 951 bp, synthetic construct
  source 1..951: mol_type = other DNA
attgaaggttcaccacatcatgaatctgataactcaatcgcaactaaaattttgaactttggtcatacatgttggaaattgcaaagaccatacgttgttaagggtatgatttctattgctgctggtttatttggtaaagaattgtttaataacagacatttgttttcttggggtttgatgtggaaagcatttttcgcattagttccaatcttgtcttttaatttctttgctgcaatcatgaaccaaatatatgatgttgatattgatagaattaataagccagatttgccattggtttctggtgaaatgtcaatcgaaactgcttggattttatctatcatcgttgcattgactggtttgatcgttacaattaaattaaaatcagctccattgttcgtttttatatatatcttcggtatcttcgctggttttgcatactctgttccaccaattagattgaagcaatacccttttactaatttcttgatcacaatttcttcacatgttggtttggcttttactgtttactcagctactacatctgcattaggtttgccatttgtttggaggccagctttttcttttattatcgcttttatgactgttatgggtggtacaatcgctttcgcaaaggatatctctgatattgaaggtgacgctaaatacggtgtttcaactgttgctacaaaattgggtgcaagaaacatgactttcgttgtttctggtgttttgttgttgaactatttggtttctatctcaatcggtattatttggccacaagtttttaaatctaacatcatgatcttgtcacatgctatcttggcattctgtttgatcttccaaacaagagaattagctttggcaaattatgcttctgcaccatcaagacaatttttcgagtttatttggttgttgtactacgctgaatattttgtttacgtttttatttga

SEQ ID NO: 288 - protein, 316 aa, synthetic construct
IEGSPHHESDNSIATKILNFGHTCWKLQRPYVVKGMISIAAGLFGKELFNNRHLFSWGLMWKAFFALVPILSFNFFAAIMNQIYDVDIDRINKPDLPLVSGEMSIETAWILSIIVALTGLIVTIKLKSAPLFVFIYIFGIFAGFAYSVPPIRLKQYPFTNFLITISSHVGLAFTVYSATTSALGLPFVWRPAFSFIIAFMTVMGGTIAFAKDISDIEGDAKYGVSTVATKLGARNMTFVVSGVLLLNYLVSISIGIIWPQVFKSNIMILSHAILAFCLIFQTRELALANYASAPSRQFFEFIWLLYYAEYFVYVFI

SEQ ID NO: 289 - DNA, 951 bp, synthetic construct
  source 1..951: mol_type = other DNA
attgaaggttcaccacattgtgaatctgataactcaatcgcaactaaaattttgaactttggtcatacatgttggaaattgcaaagaccatacgttgttaagggtatgatttctattgcttgtggtttatttggtagagaattgtttaataacccacatttgttttcttggggtttgatgtggaaagcatttttcgcattagttccaatcttgtcttttaatttctttgctgcaatcatgaaccaaatatatgatgttgatattgatagaattaataagccagatttgccattggtttctggtgaaatgtcaatcgaaactgcttggattttatctatcatcgttgcattgactggtttgatcgttacaattaaattaaaatcagctccattgttcgtttttatatatatcttcggtatcttcgctggttttgcatactctgttccaccaattagattgaagcaatacccttttactaatttcttgatcacaatttcttcacatgttggtttggcttttactgtttactcagctactacatctgcattaggtttgccatttgtttggaggccagctttttcttttattatcgcttttatgactgttatgtctggtacaatcgctttcgcaaaggatatctctgatattgaaggtgacgctaaatacggtgtttcaactgttgctacaaaattgggtgcaagaaacatgactttcgttgtttctggtgttttgttgttgaactatttggtttctatctcaatcggtattatttggccacaagtttttaaatctaacatcatgatcttgtcacatgctatcttggcattcatgttgatcttcagaacaagagaattagctttggcaaattatgcttctgcaccagctagacaatttttcgagtttatttggttgttgtactacgctgaatattttgtttacgtttttatttga

SEQ ID NO: 290 - protein, 316 aa, synthetic construct
IEGSPHCESDNSIATKILNFGHTCWKLQRPYVVKGMISIACGLFGRELFNNPHLFSWGLMWKAFFALVPILSFNFFAAIMNQIYDVDIDRINKPDLPLVSGEMSIETAWILSIIVALTGLIVTIKLKSAPLFVFIYIFGIFAGFAYSVPPIRLKQYPFTNFLITISSHVGLAFTVYSATTSALGLPFVWRPAFSFIIAFMTVMSGTIAFAKDISDIEGDAKYGVSTVATKLGARNMTFVVSGVLLLNYLVSISIGIIWPQVFKSNIMILSHAILAFMLIFRTRELALANYASAPARQFFEFIWLLYYAEYFVYVFI

SEQ ID NO: 291 - DNA, 951 bp, synthetic construct
  source 1..951: mol_type = other DNA
attgaaggttcaggtcatcatgaatctgataactcaatcgcaactaaaattttgaactttggtcatacatgttggaaattgcaaagaccatacgttgttaagggtatgatttctattgcttgtggtttatttggtagagaattgtttaataacccacatttgttttcttggggtttgatgtggaaagcatttttcgcattagttccaatcttgtcttttaatttctttgctgcagctatgaaccaaatatatgatgttgatattgatagaattaataagccagatttgccattggtttctggtgaaatgtcaatcgaaactgcttggattttatctatcatcgttgcattgactggtttgatcgttacaatttggttaaaatcagctccattgttcgtttttatatatatcttcggtatcttcgctggttttgcatactctgttccaccaattagatggaagcaatacccttttactaatttcttgatcacaatttcttcacatgttggtttggcttttacttcttactcagctactacatctgcattaggtttgccatttgtttggaggccagctttttcttttattatcgcttttatgactgttatgggtatgacaatcgctttcgcaaaggatatctctgatattgaaggtgacgctaaatacggtgtttcaactgttgctacaaaattgggtgcaagaaacatgactttcgttgtttctggtgttttgttgttgaactatttggtttctatctcaatcggtattatttggccacaagtttttaaatctaacatcatgatcttgtcacatgctatcttggcattctgtttgatcttccaaacaagagaattagctttggcaaattatgcttctgcaccatcaagacaatttttcgagtttatttggttgttgtactacgctgaatattttgtttacgtttttatttga

SEQ ID NO: 292 - protein, 316 aa, synthetic construct
IEGSGHHESDNSIATKILNFGHTCWKLQRPYVVKGMISIACGLFGRELFNNPHLFSWGLMWKAFFALVPILSFNFFAAAMNQIYDVDIDRINKPDLPLVSGEMSIETAWILSIIVALTGLIVTIWLKSAPLFVFIYIFGIFAGFAYSVPPIRWKQYPFTNFLITISSHVGLAFTSYSATTSALGLPFVWRPAFSFIIAFMTVMGMTIAFAKDISDIEGDAKYGVSTVATKLGARNMTFVVSGVLLLNYLVSISIGIIWPQVFKSNIMILSHAILAFCLIFQTRELALANYASAPSRQFFEFIWLLYYAEYFVYVFI

SEQ ID NO: 293 - DNA, 951 bp, synthetic construct
  source 1..951: mol_type = other DNA
attgaaggttcaggtcattgtgaatctgttaactcaatcgcaactaaaattttgaactttggtcatacatgttggaaattgcaaagaccatacgttgttaagggtatgatttctattgcttctggtttatttggtagagaattgttgaataacccacatttgttttcttggggtttgatgtggaaagcaactttcgcattagttccaatcttgtcttttaatttctttgctgcaatcatgaaccaaatatatgatgttgatattgatagaattaataagccagatttgccattggtttctggtgaaatgtcaatcgaaactgcttggattttatctatcatcgttgcattgactggtttgatcgttacaattaaattaaaatcagctccattgttcgtttttatatatatcttcggtatcttcgctggttttgcatactctgttccaccaattagatggaagcaatacccttttactaacttcttgatcacaatttcttcacatgttggtttggcttttactgtttacgctgctactacatctgcattaggtttgccatttgtttggaggccagctttttcttttattatcgcttttatgactgttatgggtggtacaatcgctttcgcaaaggatatctctgatattgaaggtgacgctaaatacggtgtttcaactgttgctacaaaattgggtgcaagaaacatgactttcgttgtttctggtgttttgttgttgaactatttggtttctatctcaatcggtattatttggccacaagtttttaaatctaacatcatgatcttgtcacatgctatcttggcattctgtttgatcttccaaacaagagaattagctttggcaaattatgcttctgcaccatcaagacaatttttcgagtttatttggttgttgtactacgctgaatattttgtttacgtttttatttga

SEQ ID NO: 294 - protein, 316 aa, synthetic construct
IEGSGHCESVNSIATKILNFGHTCWKLQRPYVVKGMISIASGLFGRELLNNPHLFSWGLMWKATFALVPILSFNFFAAIMNQIYDVDIDRINKPDLPLVSGEMSIETAWILSIIVALTGLIVTIKLKSAPLFVFIYIFGIFAGFAYSVPPIRWKQYPFTNFLITISSHVGLAFTVYAATTSALGLPFVWRPAFSFIIAFMTVMGGTIAFAKDISDIEGDAKYGVSTVATKLGARNMTFVVSGVLLLNYLVSISIGIIWPQVFKSNIMILSHAILAFCLIFQTRELALANYASAPSRQFFEFIWLLYYAEYFVYVFI

SEQ ID NO: 295 - DNA, 951 bp, synthetic construct
  source 1..951: mol_type = other DNA
attgaaggttcaggtcatcatgaatctgataactcaatcgcaactaaaattttgaactttggtcatacatgttggaaattgcaaagaccatacgttgttaagggtatgatttctattgcttgtggtttatttggtagagaattgttgaataacagacatttgttttcttggggtttgatgtggaaagcatttttcgcattagttccaatcttgtcttttaatttctttgctgcagctatgaaccaaatatatgatgttgatattgatagaattaataagccagatttgccattggtttctggtgaaatgtcaatcgaaactgcttggattttatctatcatcgttgcattgactggtttgatcgttacaattaaattaaaatcagctccattgttcgtttttatatatatcttcggtatcttcgctggttttgcatactctgttccaccaattagatggaagcaatacccttttactaatttcttgatcacaatttcttcacatgttggtttggcttttacttcttacactgctactacatctgcattaggtttgccatttgtttggaggccagctttttcttttattatcgcttttatgactgttatgggtatgacaatcgctttcgcaaaggatatctctgatattgaaggtgacgctaaatacggtgtttcaactgttgctacaaaattgggtgcaagaaacatgactttcgttgtttctggtgttttgttgttgaactatttggtttctatctcaatcggtattatttggccacaagtttttaaatctaacatcatgatcttgtcacatgctatcttggcattctgtttgatcttccaaacaagagaattagctttggcaaattatgcttctgcaccatcaagacaatttttcgagtttatttggttgttgtactacgctgaatattttgtttacgtttttatttga

SEQ ID NO: 296 - protein, 316 aa, synthetic construct
IEGSGHHESDNSIATKILNFGHTCWKLQRPYVVKGMISIACGLFGRELLNNRHLFSWGLMWKAFFALVPILSFNFFAAAMNQIYDVDIDRINKPDLPLVSGEMSIETAWILSIIVALTGLIVTIKLKSAPLFVFIYIFGIFAGFAYSVPPIRWKQYPFTNFLITISSHVGLAFTSYTATTSALGLPFVWRPAFSFIIAFMTVMGMTIAFAKDISDIEGDAKYGVSTVATKLGARNMTFVVSGVLLLNYLVSISIGIIWPQVFKSNIMILSHAILAFCLIFQTRELALANYASAPSRQFFEFIWLLYYAEYFVYVFI

SEQ ID NO: 297 - DNA, 951 bp, synthetic construct
  source 1..951: mol_type = other DNA
attgaaggttcaggtcatcatgaatctgttaactcaatcgcaactaaaattttgaactttggtcatacatgttggaaattgcaaagaccatacgttgttaagggtatgatttctattgcttctggtttatttggtaaagaattgtttaataacagacatttgttttcttggggtttgatgtggaaagcatttttcgcattagttccaatcttgtcttttaatttctttgctgcaaacatgaaccaaatatatgatgttgatattgatagaattaataagccagatttgccattggtttctggtgaaatgtcaatcgaaactgcttggattttatctatcatcgttgcattgactggtttgatcgttacaattaaattaaaatcagctccattgttcgttggtatatatatcttcggtatcttcgctggttttgcatactctgttccaccaattagatggaagcaatacccttttactaatttcttgatcacaatttcttcacatgttggtttggcttttactgtttacactgctactagatctgcattaggtttgccatttgtttggaggccagctttttcttttattatcgcttttatgactgttatgggtggtacaatcgctttcgcaaaggatatctctgatattgaaggtgacgctaaatacggtgtttcaactgttgctacaaaattgggtgcaagaaacatgactttcgttgtttctggtgttttgttgttgaactatttggtttctatctcaatcggtattatttggccacaagtttttaaatctaacatcatgatcttgtcacatgctatcttggcattctgtttgatcttccaaacaagagaattagctttggcaaattatgaatctgcaccagctagacaatttttcgagtttatttggttgttgtactacgctgaatattttgtttacgtttttatttga

SEQ ID NO: 298 - protein, 316 aa, synthetic construct
IEGSGHHESVNSIATKILNFGHTCWKLQRPYVVKGMISIASGLFGKELFNNRHLFSWGLMWKAFFALVPILSFNFFAANMNQIYDVDIDRINKPDLPLVSGEMSIETAWILSIIVALTGLIVTIKLKSAPLFVGIYIFGIFAGFAYSVPPIRWKQYPFTNFLITISSHVGLAFTVYTATRSALGLPFVWRPAFSFIIAFMTVMGGTIAFAKDISDIEGDAKYGVSTVATKLGARNMTFVVSGVLLLNYLVSISIGIIWPQVFKSNIMILSHAILAFCLIFQTRELALANYESAPARQFFEFIWLLYYAEYFVYVFI

SEQ ID NO: 299 - DNA, 951 bp, synthetic construct
  source 1..951: mol_type = other DNA
attgaaggttcaccacattgtgaatctgttaactcaatcgcaactaaaattttgaactttggtcatacatgttggaaattgcaaagaccatacgttgttaagggtatgatttctattgcttgtggtttatttggtaaagaattgtttaataacagacatttgttttcttggggtttgatgtggaaagcatttttcgcattagttccaatcttgtcttttaatttctttgctgcaatcatgaaccaaatatatgatgttgatattgatagaattaataagccagatttgccattggtttctggtgaaatgtcaatcgaaactgcttggattttatctatcatcgttgcattgactggtttgatcgttacaatttggttaaaatcagctccattgttcgtttttatatatatcttcggtatcttcgctggttttgcatactctgttccaccaattagatggaagcaatacccttctactaatttcttgatcacaatttcttcacatgttggtttggcttttactgtttacactgctactagatctgcattaggtttgccatttgcttggtctccagctttttcttttattatcgcttttatgactgttatgggtaggacaatcgctttcgcaaaggatatctctgatattgaaggtgacgctaaatacggtgtttcaactgttgctacaaaattgggtgcaagaaacatgactttcgttgtttctggtgttttgttgttgaactatgctgtttctatctcaatcggtattatttggccacaagtttttaaatctaacatcatgatcttgtcacatgctatcttggcattcaggttgatcagaagaacaagagaattagctttggcaaattatgaatctgcaccatcaagacaatttttcgagtttatttggttgttgtactacgctgaatcttttgtttacgtttttatttga

SEQ ID NO: 300 - protein, 316 aa, synthetic construct
IEGSPHCESVNSIATKILNFGHTCWKLQRPYVVKGMISIACGLFGKELFNNRHLFSWGLMWKAFFALVPILSFNFFAAIMNQIYDVDIDRINKPDLPLVSGEMSIETAWILSIIVALTGLIVTIWLKSAPLFVFIYIFGIFAGFAYSVPPIRWKQYPSTNFLITISSHVGLAFTVYTATRSALGLPFAWSPAFSFIIAFMTVMGRTIAFAKDISDIEGDAKYGVSTVATKLGARNMTFVVSGVLLLNYAVSISIGIIWPQVFKSNIMILSHAILAFRLIRRTRELALANYESAPSRQFFEFIWLLYYAESFVYVFI

SEQ ID NO: 301 - DNA, 951 bp, synthetic construct
  source 1..951: mol_type = other DNA
attgaaggttcaggtcattgtgaatctgataactcaatcgcaactaaaattttgaactttggtcatacatgttggaaattgcaaagaccatacgttgttaagggtatgatttctattgctgctggtttatttggtagagaattgtttaataacccacatttgttttcttggggtttgatgtggaaagcatttttcgcattagttccaatcttgtcttttaatttctttgctgcaatcatgaaccaaatatatgatgttgatattgatagaattaataagccagatttgccattggtttctggtgaaatgtcaatcgaaactgcttggattttatctatcatcgttgcattgactggtttgatcgttacaattaaattaaaatcagctccattgttcgttggtatatatatcttcggtatcttcgctggttttgcatactctgttccaccaattagattgaagcaatacccttttactaatttcttgatcacaatttcttcacatgttggtttggcttttactacttactcagctactacatctgcattaggtttgccatttgtttggaggccagctttttcttttattatcgcttttatgactgttatgggtatgacaatcgctttcgcaaaggatatctctgatattgaaggtgacgctaaatacggtgtttcgactgttgctacaaaattgggtgcaagaaacatgactttcgttgtttctggtgttttgttgttgaactatgctgttgctatctcaatcggtattatttggccacaagtttttaaatctaacatcatgatcttgtcacatgctatcttggcattctgtttgatcttccaaacaagaagattagctttggcaaattatgcttctgcaccagctagacaatttttcgagtttatttggttgtcgtactacgctgaatattttgtttacgtttttatttga

SEQ ID NO: 302 - protein, 316 aa, synthetic construct
IEGSGHCESDNSIATKILNFGHTCWKLQRPYVVKGMISIAAGLFGRELFNNPHLFSWGLMWKAFFALVPILSFNFFAAIMNQIYDVDIDRINKPDLPLVSGEMSIETAWILSIIVALTGLIVTIKLKSAPLFVGIYIFGIFAGFAYSVPPIRLKQYPFTNFLITISSHVGLAFTTYSATTSALGLPFVWRPAFSFIIAFMTVMGMTIAFAKDISDIEGDAKYGVSTVATKLGARNMTFVVSGVLLLNYAVAISIGIIWPQVFKSNIMILSHAILAFCLIFQTRRLALANYASAPARQFFEFIWLSYYAEYFVYVFI

SEQ ID NO: 303 - DNA, 951 bp, synthetic construct
  source 1..951: mol_type = other DNA
attgaaggttcaccacattgtgaatctgataactcaatcgcaactaaaattttgaactttggtcatacatgttggaaattgcaaagaccatacgttgttaagggtatgatttctattgcttctggtttatttggtaaagaattgtttaataacagacatttgttttcttggggtttgatgtggaaagcatttttcgcattagttccaatcttgtcttttaatttctttgctgcaatcatgaaccaaatatatgatgttgatattgatagaattaataagccagatttgccattggtttctggtgaaatgtcaatcgaaactgcttggattttatctatcatcgttgcattgactggtttgatcgttacaatttggttaaaatcagctccattgttcgtttttatatatatcttcggtatcttcgctggttttgcatactctgttccaccaattagatggaagcaatacccttttactaatttcttgatcacaatttcttcacatgttggtttggcttttacttcttactcagctactacatctgcattaggtttgccatttgtttggaggccagcttttttgtttattatcgcttttatgactgttatgggtatgacaatcgctttcgcaaaggatatctctgatattgaaggtgacgctaaatacggtgtttcaactgttgctacaaaattgggtgcaagaaacatgactttcgttgtttctggtgttttgttgttgaactatttggtttctatctcaatcggtattatttggccacaagtttttaaatctaacatcatgatcttgtcacatgctatcttggcattctgtttgatcttcagaacaagagaattagctttggcaaattatgaatctgcaccatcaagacaatttttcgagtttatttggttgttgtattacgctgaatattttgtttacgtttttatttga

SEQ ID NO: 304 - protein, 316 aa, synthetic construct
IEGSPHCESDNSIATKILNFGHTCWKLQRPYVVKGMISIASGLFGKELFNNRHLFSWGLMWKAFFALVPILSFNFFAAIMNQIYDVDIDRINKPDLPLVSGEMSIETAWILSIIVALTGLIVTIWLKSAPLFVFIYIFGIFAGFAYSVPPIRWKQYPFTNFLITISSHVGLAFTSYSATTSALGLPFVWRPAFLFIIAFMTVMGMTIAFAKDISDIEGDAKYGVSTVATKLGARNMTFVVSGVLLLNYLVSISIGIIWPQVFKSNIMILSHAILAFCLIFRTRELALANYESAPSRQFFEFIWLLYYAEYFVYVFI

SEQ ID NO: 305 - DNA, 951 bp, synthetic construct
  source 1..951: mol_type = other DNA
attgaaggttcaccacattgtgaatctgataactcaatcgcaactaaaattttgaactttggtcatacatgttggaaattgcaaagaccatacgttgttaagggtatgatttctattgcttgtggtttatttggtagagaattgttgaataacagacatttgttttcttggggtttgatgtggaaagcatttttcgcattagttccaatcttgtcttttaatttctttgctgcaatcatgaaccaaatatatgatgttgatattgatagaattaataagccagatttgccattggtttctggtgaaatgtcaatcgaaactgcttggattttatctatcatcgttgcattgactggtttgatcgttacaatttggttaaaatcagctccattgttcgttggtatatatatcttcggtatcttcgctggttttgcatactctgttccaccaattagatggaagcaatacccttttactaatttcttgatcacaatttcttcacatgttggtttggcttttacttcttacactgctactacatctgcattaggtttgccatttgtttggaggccagctttttcttttattatcgcttttatgactgttatgggtggtacaatcgctttcgcaaaggatatctctgatattgaaggtgacgctaaatacggtgtttcaactgttgctacaaaattgggtgcaagaaacatgactttcgttgtttctggtgttttgttgttgaactatttggtttctatctcaatcggtattatttggccacaagtttttaaatctaacatcatgatcttgtcacatgctatcttggcattctgtttgatcttccaaacaagaagattagctttggcaaattatgaatctgcaccagctagacaatttttcgagtttatttggttgttgtattacgctgaatattttgtttacgtttttatttga

SEQ ID NO: 306 - protein, 316 aa, synthetic construct
IEGSPHCESDNSIATKILNFGHTCWKLQRPYVVKGMISIACGLFGRELLNNRHLFSWGLMWKAFFALVPILSFNFFAAIMNQIYDVDIDRINKPDLPLVSGEMSIETAWILSIIVALTGLIVTIWLKSAPLFVGIYIFGIFAGFAYSVPPIRWKQYPFTNFLITISSHVGLAFTSYTATTSALGLPFVWRPAFSFIIAFMTVMGGTIAFAKDISDIEGDAKYGVSTVATKLGARNMTFVVSGVLLLNYLVSISIGIIWPQVFKSNIMILSHAILAFCLIFQTRRLALANYESAPARQFFEFIWLLYYAEYFVYVFI

SEQ ID NO: 307 - DNA, 951 bp, synthetic construct
  source 1..951: mol_type = other DNA
attgaaggttcaggtcattgtgaatctgttaactcaatcgcaactaaaattttgaactttggtcatacatgttggaaattgcaaagaccatacgttgttaagggtatgatttctattgctgctggtttatttggtaaagaattgtttaataacagacatttgttttcttggggtttgatgtggaaagcatttttcgcattagttccaatcttgtcttttaatttctttgctgcaatcatgaaccaaatatatgatgttgatattgatagaattaataagccagatttgccattggtttctggtgaaatgtctatcgaaactgcttggattttatctatcatcgttgcattgactggtttgatcgttacaattaaattaaaatcagctccattgttcgttggtatatatatcttcggtatcttcgctggttctgcatactctgttccaccaattagattgaagcaatacccttttactaatttcttgatcacaatttcttcacatgttggtttggcttttacttcttactcagctactacatctgcattaggtttgccatttgtttggaggccagctttttcttttattatcgcttttatgactgttatgtctatgacaatcgctttcgcaaaggatatctctgatattgaaggtgacgctaaatacggtgtttcaactgttgctacaaaattgggtgcaagaaacatgactttcgttgtttctggtgttttgttgttgaactatgctgttgctatctcaatcggtattatttggccacaagtttttaaatctaacatcatgatcttgtcacatgctatcttggcattcatgttgatcagaagaacaagagaattagctttggcaaattatgcttctgcaccatcaagacaatttttcgagtttatttggttgttgtactacgctgaatattttgtttacgtttttatttga

SEQ ID NO: 308 - protein, 316 aa, synthetic construct
IEGSGHCESVNSIATKILNFGHTCWKLQRPYVVKGMISIAAGLFGKELFNNRHLFSWGLMWKAFFALVPILSFNFFAAIMNQIYDVDIDRINKPDLPLVSGEMSIETAWILSIIVALTGLIVTIKLKSAPLFVGIYIFGIFAGSAYSVPPIRLKQYPFTNFLITISSHVGLAFTSYSATTSALGLPFVWRPAFSFIIAFMTVMSMTIAFAKDISDIEGDAKYGVSTVATKLGARNMTFVVSGVLLLNYAVAISIGIIWPQVFKSNIMILSHAILAFMLIRRTRELALANYASAPSRQFFEFIWLLYYAEYFVYVFI

SEQ ID NO: 309 - DNA, 951 bp, synthetic construct
  source 1..951: mol_type = other DNA
attgaaggttcaggtcatcatgaatctgataactcaatcgcaactaaaattttgaactttggtcatacatgttggaaattgcaaagaccatacgttgttaagggtatgatttctattgcttgtggtttatttggtaaagaattgtttaataacagacattcgttttcttggggtttgatgtggaaagcatttttcgcattagttccaatcttgtcttttaatttctttgctgcaatcatgaaccaaatatatgatgttgatattgatagaattaataagccagatttgccattggtttctggtgaaatgtcaatcgaaactgcttggattttatctatcatcgttgcattgactggtttgatcgttacaatttggttaaaatcagctccattgttcgtttttatatatatcttcggtatcttcgctggttttgcatactctgttccaccaattagattgaagcaatacccttttactaatttcttgatcacaatttcttcacatgttggtttggcttttactacttacactgctactacatctgcattaggtttgccatttgtttggaggccagctttttcttttattatcgcttttatgactgttatgggtatgacaatcgctttcgcaaaggatatctgtgatattgaaggtgacgctaaatacggtgtttcaactgttgctacaaaattgggtgcaagaaacatgactttcgttgtttctggtgttttgttgttgaactatttggtttctatctcaatcggtattatttggccacaagtttttaaatctaacatcatgatcttgtcacatgctatcttggcactctgtttgatcagaagaacaagagaattagctttggcaaattatgcttctgcaccatcaagacaatttttcgagtttatttggttgttgtattaccctgaatgttttgttcacgtttttatttga

SEQ ID NO: 310 - protein, 316 aa, synthetic construct
IEGSGHHESDNSIATKILNFGHTCWKLQRPYVVKGMISIACGLFGKELFNNRHSFSWGLMWKAFFALVPILSFNFFAAIMNQIYDVDIDRINKPDLPLVSGEMSIETAWILSIIVALTGLIVTIWLKSAPLFVFIYIFGIFAGFAYSVPPIRLKQYPFTNFLITISSHVGLAFTTYTATTSALGLPFVWRPAFSFIIAFMTVMGMTIAFAKDICDIEGDAKYGVSTVATKLGARNMTFVVSGVLLLNYLVSISIGIIWPQVFKSNIMILSHAILALCLIRRTRELALANYASAPSRQFFEFIWLLYYPECFVHVFI

SEQ ID NO: 311 - DNA, 951 bp, synthetic construct
  source 1..951: mol_type = other DNA
attgaaggttcaggtcatcatgaatctgttaactcaatcgcaactaaaattttgaactttggtcatacatgttggaaattgcaaagaccatacgttgttaagggtatgatttctattgcttgtggtttatttggtaaagaattgtttaataacagacatttgttttcttggggtttgatgtggaaagcatttttcgcattagttccaatcttgtcttttaatttctttgctgcatgtatgaaccaaatatatgatgttgatattgatagaattaataagccagatttgccattggtttctggtgaaatgtcaatcgaaactgcttggattttatctatcatcgttgcattgactggtttgatcgttacaattaaattaaaatcagctccattgttcgtttttatatatatcttcggtatcttcgctggttttgcatactctgttccaccaattagatggaagcaatacccttttactaatttcttgatcacaatttcttcacatgttggtttggcttttacttcttactcagctactacatctgcattaggtttgccatttgtttggaggccagctttttcttttattatcgcttttatgactgttatgggtatgacaatcgctttcgcaaaggatatctctgatattgaaggtgacgctaaatacggtgtttcaactgttgctacaaaattgggtgcaagaaacatgactttcgttgtttctggtgttttgttgttgaactatttggtttctatctcaatcggtattatttggccacaagtttttaaatctaacatcatgatcttgtcacatgctatcttggcattctgtttgatcttccaaacaagagaattagctttggcaaattatgcttctgcaccatcaagacaatttttcgagtttatttggttgttgtactacgctgaatattttgtttacgtttttatttga

SEQ ID NO: 312 - protein, 316 aa, synthetic construct
IEGSGHHESVNSIATKILNFGHTCWKLQRPYVVKGMISIACGLFGKELFNNRHLFSWGLMWKAFFALVPILSFNFFAACMNQIYDVDIDRINKPDLPLVSGEMSIETAWILSIIVALTGLIVTIKLKSAPLFVFIYIFGIFAGFAYSVPPIRWKQYPFTNFLITISSHVGLAFTSYSATTSALGLPFVWRPAFSFIIAFMTVMGMTIAFAKDISDIEGDAKYGVSTVATKLGARNMTFVVSGVLLLNYLVSISIGIIWPQVFKSNIMILSHAILAFCLIFQTRELALANYASAPSRQFFEFIWLLYYAEYFVYVFI

SEQ ID NO: 313 - DNA, 951 bp, synthetic construct
  source 1..951: mol_type = other DNA
attgaaggttcaggtcatcatgaatctgttaactcaatcgcaactaaaattttgaactttggtcatacatgttggaaattgcaaagaccatacgttgttaagggtatgatttctattgcttgtggtttatttggtaaagaattgtttaataacagacatttgttttcttggggtttgatgtggaaagcatttttcgcattagttccaatcttgtcttttaatttctttgctgcaatcatgaaccaaatatatgatgttgatattgatagaattaataagccagatttgccattggtttctggtgaaatgtcaatcgaaactgcttggattttatctatcatcgttgcattgactggtttgatcgttacaattaaattaaaatcagctccattgttcgtttttatatatatcttcggtatcttcgctggttttgcatactctgttccaccaattagattgaagcaatacccttttactaatttcttgatcacaatttcttcacatgttggtttggcttttactgtttacactgctactagatctgcattaggtttgccatttgtttggaggccagctttttcttttattatcgcttttatgactgttatgggtatgacaatcgctttcgcaaaggatatctgtgatattgaaggtgacgctaaatacggtgtttcaactgttgctacaaaattgggtgcaagaaacatgactttcgttgtttctggtgttttgttgttgaactatttggttgctatctcaatcggtattatttggccacaagtttttaaatctaacatcatgatcttgtcacatgctatcttggcattcatgttgatcagaagaacaagagaattagctttggcaaattatgcttctgcaccagctagacaatttttcgagtctctgtgccggttgtattacgctgaatcgtcggtttacgtttttatttga

SEQ ID NO: 314 - protein, 316 aa, synthetic construct
IEGSGHHESVNSIATKILNFGHTCWKLQRPYVVKGMISIACGLFGKELFNNRHLFSWGLMWKAFFALVPILSFNFFAAIMNQIYDVDIDRINKPDLPLVSGEMSIETAWILSIIVALTGLIVTIKLKSAPLFVFIYIFGIFAGFAYSVPPIRLKQYPFTNFLITISSHVGLAFTVYTATRSALGLPFVWRPAFSFIIAFMTVMGMTIAFAKDICDIEGDAKYGVSTVATKLGARNMTFVVSGVLLLNYLVAISIGIIWPQVFKSNIMILSHAILAFMLIRRTRELALANYASAPARQFFESLCRLYYAESSVYVFI

SEQ ID NO: 315 - DNA, 951 bp, synthetic construct
  source 1..951: mol_type = other DNA
attgaaggttcaccacatcatgaatctgttaactcaatcgcaactaaaattttgaactttggtcatacatgttggaaattgcaaagaccatacgttgttaagggtatgatttctattgcttgtggtttatttggtaaagaattgtttaataacagacatttgttttcttggggtttgatgtggaaagcaactttcgcattagttccaatcttgtcttttaatttctttgctgcagctatgaaccaaatatatgatgttgatattgatagaattaataagccagatttgccattggtttctggtgaaatgtcaatcgaaactgcttggattttatctatcatcgttgcactgactggtttgatcgttacaattaaattaaaatcagctccattgttcgtttttatatatatcttcggtatcttcgctggttttgcatactctgttccaccaattagattgaagcaatacccttttactaatttcttgatcacaatttcttcacatgttggtttggcttttacttcttacgctgctactagatctgcattaggtttgccatttgtttggaggccagcttttttgtttattatcgcttttatgactgttatgggtatgacaatcgctttcgcaaaggatatctctgatattgaaggtgacgctaaatacggtgtttcaactgttgctacaaaattgggtgcaagaaacatgactttcgttgtttctggtgttttgttgttgaactatttggttgctatctcaatcggtattatttggccacaagtttttaaatctaacatcatgatcttgtcacatgctatcttggcattctgtttgatcttccaaacaagagaattagctttggcaaattatgcttctgcaccagctagacaatttttcgagtttatttggttgttgtactacgctgaatattttgtttacgtttttatttga

SEQ ID NO: 316 - protein, 316 aa, synthetic construct
IEGSPHHESVNSIATKILNFGHTCWKLQRPYVVKGMISIACGLFGKELFNNRHLFSWGLMWKATFALVPILSFNFFAAAMNQIYDVDIDRINKPDLPLVSGEMSIETAWILSIIVALTGLIVTIKLKSAPLFVFIYIFGIFAGFAYSVPPIRLKQYPFTNFLITISSHVGLAFTSYAATRSALGLPFVWRPAFLFIIAFMTVMGMTIAFAKDISDIEGDAKYGVSTVATKLGARNMTFVVSGVLLLNYLVAISIGIIWPQVFKSNIMILSHAILAFCLIFQTRELALANYASAPARQFFEFIWLLYYAEYFVYVFI

SEQ ID NO: 317 - DNA, 951 bp, synthetic construct
  source 1..951: mol_type = other DNA
attgaaggttcaccacattgtgaatctgttaactcaatcgcaactaaaattttgaactttggtcatacatgttggaaattgcaaagaccatacgttgttaagggtatgatttctattgctgctggtttatttggtagagaattgtttaataacagacatttgttttcttggggtttgatgtggaaagcatttttcgcattagttccaatcttgtcttttaatttctttgctgcaatcatgaaccaaatatatgatgttgatattgatagaattaataagccagatttgccattggtttctggtgaaatgtcaatcgaaactgcttggattttatctatcatcgttgcattgactggtttgatcgttacaattaaattaaaatcagctccattgttcgtttttatatatatcttcggtatcttcgctggttttgcatactctgttccaccaattagatggaagcaatacccttttactaatttcttgatcacaatttcttcacatgttggtttggcttttactgtttactcagctactacatctgcattaggtttgccatttgtttggaggccagctctttcttttattatcgcttttatgactgttatgggtatgacaatcgctttcgcaaaggatatctctgatattgaaggtgacgctaaatacggtgtttcaactgttgctacaaaattgggtgcaagaaacatgactttcgttgtttctggtgttttgttgttgaactatttggtttctatctcaatcggtattatttggccacaagtttttaaatctaacatcatgatcttgtcacatgctatcttggcattctgtttgatcttccaaacaagagaattagctttggcaaattatgcttctgcaccatcaagacaatttttcgagtttatttggttgttgtactacgctgaatattttgtttacgtttttatttga

SEQ ID NO: 318 - protein, 316 aa, synthetic construct
IEGSPHCESVNSIATKILNFGHTCWKLQRPYVVKGMISIAAGLFGRELFNNRHLFSWGLMWKAFFALVPILSFNFFAAIMNQIYDVDIDRINKPDLPLVSGEMSIETAWILSIIVALTGLIVTIKLKSAPLFVFIYIFGIFAGFAYSVPPIRWKQYPFTNFLITISSHVGLAFTVYSATTSALGLPFVWRPALSFIIAFMTVMGMTIAFAKDISDIEGDAKYGVSTVATKLGARNMTFVVSGVLLLNYLVSISIGIIWPQVFKSNIMILSHAILAFCLIFQTRELALANYASAPSRQFFEFIWLLYYAEYFVYVFI

SEQ ID NO: 319 - DNA, 951 bp, synthetic construct
  source 1..951: mol_type = other DNA
attgaaggttcaccacattgtgaatctgataactcaatcgcaactaaaattttgaactttggtcatacatgttggaaattgcaaagaccatacgttgttaagggtatgatttctattgctgctggtttatttggtaaagaattgtttaataacccacatttgttttcttggggtttgatgtggaaagcatttttcgcattagttccaatcttgtcttttaatttctttgctgcaatcatgaaccaaatatatgatgttgatattgatagaattaataagccagatttgccattggtttctggtgaaatgtcaatcgaaactgcttggattttatctatcatcgttgcattgactggtttgatcgttacaatttggttaaaatcagctccattgttcgttggtatatatatcttcggtatcttcgctggttttgcatactctgttccaccaattagatggaagcaatacccttttactaatttcttgatcacaatttcttcacatgttggtttggcttttacttcttacactgctactacatctgcattaggtttgccatttgtttggaggccagctttttcttttattatcgcttttatgactgttatgggtatgacaatcgctttcgcaaaggatatctctgatattgaaggtgacgctaaatacggtgtttcaactgttgctacaaaattgggtgcaagaaacatgactttcgttgtttctggtgttttgttgttgaactatttggtttctatctcaatcggtattatttggccacaagtttttaaatctaacatcatgatcttgtcacatgctatcttggcattctgtttgatcttccaaacaagagaattagctttggcaaattatgcttctgcaccatcaagacaatttttcgagtttatttggttgttgtactacgctgaatattttgtttacgtttttatttga

SEQ ID NO: 320 - protein, 316 aa, synthetic construct
IEGSPHCESDNSIATKILNFGHTCWKLQRPYVVKGMISIAAGLFGKELFNNPHLFSWGLMWKAFFALVPILSFNFFAAIMNQIYDVDIDRINKPDLPLVSGEMSIETAWILSIIVALTGLIVTIWLKSAPLFVGIYIFGIFAGFAYSVPPIRWKQYPFTNFLITISSHVGLAFTSYTATTSALGLPFVWRPAFSFIIAFMTVMGMTIAFAKDISDIEGDAKYGVSTVATKLGARNMTFVVSGVLLLNYLVSISIGIIWPQVFKSNIMILSHAILAFCLIFQTRELALANYASAPSRQFFEFIWLLYYAEYFVYVFI

SEQ ID NO: 321 - DNA, 951 bp, synthetic construct
  source 1..951: mol_type = other DNA
attgaaggttcaggtcattgtgaatctgttaactcaatcgcaactaaaattttgaactttggtcatacatgttggaaattgcaaagaccatacgttgttaagggtatgatttctattgctgctggtttatttggtagagaattgtttaataacagacatttgttttcttggggtttgatgtggaaagcatttttcgcattagttccaatcttgtcttttaatttctttgctgcaatcatgaaccaaatatatgatgttgatattgatagaattaataagccagatttgccattggtttctggtgaaatgtcaatcgaaactgcttggattttatctatcatcgttgcattgactggtttgatcgttacaatttggttaaaatcagctccattgttcgtttttatatatatcttcggtatcttcgctggttttgcatactctgttccaccaattagatggaagcaatacccttttactaatttcctgatcacaatttcttcacatgttggtttggcttttacttcttactcagctactacatctgcattaggtttgccatttgtttggaggccagcttttttgtttattatcgcttttatgactgttatgtctggtacaatcgctttcgcaaaggatatctctgatattgaaggtgacgctaaatacggtgtttcaactgttgctacaaaattgggtgcaagaaacatgactttcgttgtttctggtgttttgttgttgaactatttggtttctatctcaatcggtattatttggccacaagtttttaaatctaacatcatgatcttgtcacatgctatcttggcattctgtttgatcagacaaacaagagaattagctttggcaaattatgaatctgcaccagctagacaatttttcgagtttatttggttgttgtattacgctgaatattttgtttacgtttttatttga

SEQ ID NO: 322 - protein, 316 aa, synthetic construct
IEGSGHCESVNSIATKILNFGHTCWKLQRPYVVKGMISIAAGLFGRELFNNRHLFSWGLMWKAFFALVPILSFNFFAAIMNQIYDVDIDRINKPDLPLVSGEMSIETAWILSIIVALTGLIVTIWLKSAPLFVFIYIFGIFAGFAYSVPPIRWKQYPFTNFLITISSHVGLAFTSYSATTSALGLPFVWRPAFLFIIAFMTVMSGTIAFAKDISDIEGDAKYGVSTVATKLGARNMTFVVSGVLLLNYLVSISIGIIWPQVFKSNIMILSHAILAFCLIRQTRELALANYESAPARQFFEFIWLLYYAEYFVYVFI

SEQ ID NO: 323 - DNA, 951 bp, synthetic construct
  source 1..951: mol_type = other DNA
attgaaggttcaggtcatcatgaatctgataactcaatcgcaactaaaattttgaactttggtcatacatgttggaaattgcaaagaccatacgttgttaagggtatgatttctattgcttgtggtttatttggtagagaattgttgaataacccacatttgttttcttggggtttgatgtggaaagcatttttcgcattagttccaatcttgtcttttaatttctttgctgcaatcatgaaccaaatatatgatgttgatattgatagaattaataagccagatttgccattggtttctggtgaaatgtcaatcgaaactgcttggattttatctatcatcgttgcattgactggtttgatcgttacaatttggttaaaatcagctccattgttcgttggtatatatatcttcggtatcttcgctggttttgcatactctgttccaccaattagattgaagcaatacccttttactaatttcttgatcacaatttcttcacatgttggtttggcttttacttcttacactgctactacatctgcattaggtttgccatttgtttggtctccagctttttcttttattatcgcttttatgactgttatgggtggtacaatcgctttcgcaaaggatatctgtgatattgaaggtgacgctaaatacggtgtttcaactgttgctacaaaattgggtgcaagaaacatgactttcgttgtttctggtgttttgttgttgaactatttggtttctatctcaatcggtattatttggccacaagtttttaaatctaacatcatgatcttgtcacatgctatcttggcattctgtttgatcagacaaacaagagaattagctttggcaaattatgaatctgcaccagctagacaatttttcgagtttatttggttgttgtattacgctgaatattttggtcacgtttttatttga

SEQ ID NO: 324 - protein, 316 aa, synthetic construct
IEGSGHHESDNSIATKILNFGHTCWKLQRPYVVKGMISIACGLFGRELLNNPHLFSWGLMWKAFFALVPILSFNFFAAIMNQIYDVDIDRINKPDLPLVSGEMSIETAWILSIIVALTGLIVTIWLKSAPLFVGIYIFGIFAGFAYSVPPIRLKQYPFTNFLITISSHVGLAFTSYTATTSALGLPFVWSPAFSFIIAFMTVMGGTIAFAKDICDIEGDAKYGVSTVATKLGARNMTFVVSGVLLLNYLVSISIGIIWPQVFKSNIMILSHAILAFCLIRQTRELALANYESAPARQFFEFIWLLYYAEYFGHVFI

SEQ ID NO: 325 - DNA, 951 bp, synthetic construct
  source 1..951: mol_type = other DNA
attgaaggttcaccacattgtgaatctgttaactcaatcgcaactaaaattttgaactttggtcatacatgttggaaattgcaaagaccatacgttgttaagggtatgatttctattgcttgtggtttatttggtagagaattgtttaataacagacatttgttttcttggggtttgatgtggaaagcatttttcgcattagttccaatcttgtcttttaatttctttgctgcaatcatgaaccaaatatatgatgttgatattgatagaattaataagccagatttgccattggtttctggtgaaatgtcaatcgaaactgcttggattttatctatcatcgttgcattgactggtttgatcgttacaatttggttaaaatcagctccattgttcgttggtatatatatcttcggtatcttcgctggttttgcatactctgttccaccaattagatggaagcaatacccttttactaatttcttgatcacaatttcttcacatgttggtttggcttttacttcttactcagctactacatctgcattaggtttgccatttgtttggaggccagctttttcttttattatcgcttttatgactgttatgggtatgacaatcgctttcgcaaaggatatctctgatattgaaggtgacgctaaatacggtgtttcaactgttgctacaaaattgggtgcaagaaacatgactttcgttgtttctggtgttttgttgttgaactatttggtttctatctcaatcggtattatttggccacaagtttttaaatctaacatcatgatcttgtcacatgctatcttggcattctgtttgatcttccaaacaagagaattagctttggcaaattatgcttctgcaccatcaagacaatttttcgagtttatttggttgttgtactacgctgaatattttgtttacgtttttatttga

SEQ ID NO: 326 - protein, 316 aa, synthetic construct
IEGSPHCESVNSIATKILNFGHTCWKLQRPYVVKGMISIACGLFGRELFNNRHLFSWGLMWKAFFALVPILSFNFFAAIMNQIYDVDIDRINKPDLPLVSGEMSIETAWILSIIVALTGLIVTIWLKSAPLFVGIYIFGIFAGFAYSVPPIRWKQYPFTNFLITISSHVGLAFTSYSATTSALGLPFVWRPAFSFIIAFMTVMGMTIAFAKDISDIEGDAKYGVSTVATKLGARNMTFVVSGVLLLNYLVSISIGIIWPQVFKSNIMILSHAILAFCLIFQTRELALANYASAPSRQFFEFIWLLYYAEYFVYVFI

SEQ ID NO: 327 - DNA, 951 bp, synthetic construct
  source 1..951: mol_type = other DNA
attgaaggttcaccacatcatgaatctgttaactcaatcgcaactaaaattttgaactttggtcatacatgttggaaattgcaaagaccatacgttgttaagggtatgatttctattgcttgtggtttatttggtagagaattgttgaataacccacatttgttttcttggggtttgatgtggaaagcaactttcgcattagttccaatcttgtcttttaacttctttgctgcaatcatgaaccaaatatatgatgttgatattgatagaattaataagccagatttgccattggtttctggtgaaatgtcaatcgaaactgcttggattttatctatcatcgttgcattgactggtttgatcgttacaattaaattaaaatcagctccattgttcgtttttatatatatcttcggtatcttcgctggttttgcatactctgttccaccaattagattgaagcaatacccttttactaatttcttgatcacaatttcttcacatgttggtttggcttttactgtttacgctgctactacatctgcattaggtttgccatttgtttggaggccagctttttcttttattatcgcttttatgactgttatgggtatgacaatcgctttcgcaaaggatatctctgatattgaaggtgacgctaaatacggtgtttcaactgttgctacaaaattgggtgcaagaaacatgactttcgttgtttctggtgttttgttgttgaactatttggtttctatctcaatcggtattatttggccacaagtttttaaatctaacatcatgatcttgtcacatgctatcttggcattctgtttgatcttcagaacaagagaattagctttggcaaattatgcttctgcaccagctagacaatttttcgagtttatttggttgttgtattacgctgaatatcctgtttacgtttttatttga

SEQ ID NO: 328 - protein, 316 aa, synthetic construct
IEGSPHHESVNSIATKILNFGHTCWKLQRPYVVKGMISIACGLFGRELLNNPHLFSWGLMWKATFALVPILSFNFFAAIMNQIYDVDIDRINKPDLPLVSGEMSIETAWILSIIVALTGLIVTIKLKSAPLFVFIYIFGIFAGFAYSVPPIRLKQYPFTNFLITISSHVGLAFTVYAATTSALGLPFVWRPAFSFIIAFMTVMGMTIAFAKDISDIEGDAKYGVSTVATKLGARNMTFVVSGVLLLNYLVSISIGIIWPQVFKSNIMILSHAILAFCLIFRTRELALANYASAPARQFFEFIWLLYYAEYPVYVFI

SEQ ID NO: 329 - DNA, 951 bp, synthetic construct
  source 1..951: mol_type = other DNA
attgaaggttcaccacatcatgaatctgataactcaatcgcaactaaaattttgaactttggtcatacatgttggaaattgcaaagaccatacgttgttaagggtatgatttctattgcttctggtttatttggtagagaattgtttaataacagacatttgttttcttggggtttgatgtggaaagcatttttcgcattagttccaatcttgtcttttaatttctttgctgcaatcatgaaccaaatatatgatgttgatattgatagaattaataagccagatttgccattggtttctggtgaaatgtcaatcgaaactgcttggattttatctatcatcgttgcattgactggtttgatcgttacaattaaattaaaatcagctccattgttcgtttttatatatatcttcggtatcttcgctggttttgcatactctgttccaccaattagatggaagcaatacccttttactaatttcttgatcacaatttcttcacatgttggtttggcttttacttcttactcagctactacatctgcattaggtttgccatttgtttggaggccagctttttcttttattatcgcttttatgactgttatgggtatgacaatcgctttcgcaaaggatatctctgatattgaaggtgacgctaaatacggtgtttcaactgttgctacaaaattgggtgcaagaaacatgactttcgttgtttctggtgttttgttgttgaactatttggtttctatctcaatcggtattatttggccacaagtttttaaatctaacatcatgatcttgtcacatgctatcttggcattctgtttgatcttccaaacaagagaattagctttggcaaattatgcttctgcaccatcaagacaatttttcgagtttatttggttgttgtactacgctgaatattttgtttacgtttttatttga

SEQ ID NO: 330 - protein, 316 aa, synthetic construct
IEGSPHHESDNSIATKILNFGHTCWKLQRPYVVKGMISIASGLFGRELFNNRHLFSWGLMWKAFFALVPILSFNFFAAIMNQIYDVDIDRINKPDLPLVSGEMSIETAWILSIIVALTGLIVTIKLKSAPLFVFIYIFGIFAGFAYSVPPIRWKQYPFTNFLITISSHVGLAFTSYSATTSALGLPFVWRPAFSFIIAFMTVMGMTIAFAKDISDIEGDAKYGVSTVATKLGARNMTFVVSGVLLLNYLVSISIGIIWPQVFKSNIMILSHAILAFCLIFQTRELALANYASAPSRQFFEFIWLLYYAEYFVYVFI

SEQ ID NO: 331 - DNA, 951 bp, synthetic construct
  source 1..951: mol_type = other DNA
attgaaggttcaccacattgtgaatctgttaactcaatcgcaactaaaattttgaactttggtcatacatgttggaaattgcaaagaccatacgttgttaagggtatgatttctattgcttctggtttatttggtaaagaattgtttaataacagacatttgttttcttggggtttgatgtggaaagcatttttcgcattagttccaatcttgtcttttaatttctttgctgcaatcatgaaccaaatatatgatgttgatattgatagaattaataagccagatttgccattggtttctggtgaaatgtcaatcgaaactgcttggattttatctatcatcgttgcattgactggtttgatcgttacaatttggttaaaatcagctccattgttcgtttttatatatatcttcggtatcttcgctggttttgcatactctgttccaccaattagattgaagcaatacccttttactaatttcttgatcacaatttcttcacatgttggtttggcttttacttcttactcagctactacatctgcattaggtttgccatttgtttggaggccagcttttgcttttattatcgcttttatgactgttatgggtatgacaatcgctttcgcaaaggatatctctgatattgaaggtgacgctaaatacggtgtttcaactgttgctacaaaattgggtgcaagaaacatgactttcgttgtttctggtgttttgttgttgaactatttggtttctatctcaatcggtattatttggccacaagtttttaaatctaacatcatgatcttgtcacatgctatcttggcattctgtttgatcttccaaacaagagaattagctttggcaaattatgcttctgcaccatcaagacaatttttcgagtttatttggttgttgtactacgctgaatattttgtttacgtttttatttga

SEQ ID NO: 332 - protein, 316 aa, synthetic construct
IEGSPHCESVNSIATKILNFGHTCWKLQRPYVVKGMISIASGLFGKELFNNRHLFSWGLMWKAFFALVPILSFNFFAAIMNQIYDVDIDRINKPDLPLVSGEMSIETAWILSIIVALTGLIVTIWLKSAPLFVFIYIFGIFAGFAYSVPPIRLKQYPFTNFLITISSHVGLAFTSYSATTSALGLPFVWRPAFAFIIAFMTVMGMTIAFAKDISDIEGDAKYGVSTVATKLGARNMTFVVSGVLLLNYLVSISIGIIWPQVFKSNIMILSHAILAFCLIFQTRELALANYASAPSRQFFEFIWLLYYAEYFVYVFI

SEQ ID NO: 333 - DNA, 951 bp, synthetic construct
  source 1..951: mol_type = other DNA
attgaaggttcaccacatcatgaatctgataactcaatcgcaactaaaattttgaactttggtcatacatgttggaaattgcaaagaccatacgttgttaagggtatgatctctattgcttgtggtttatttggtagagaattgtttaataacccacatttgttttcttggggtttgatgtggaaagcaactttcgcattagttccaatcttgtcttttaatttctttgctgcatgtatgaaccaaatatatgatgttgatattgatagaattaataagccagatttgccattggtttctggtgaaatgtcaatcgaaactgcttggattttatctatcatcgttgcattgactggtttgatcgttacaattaaattaaaatcagctccattgttcgttggtatatatatcttcggtatcttcgctggttttgcatactctgttccaccaattagatggaagcaatacccttttactaatttcttgatcacaatttcttcacatgttggtttggcttttacttcttacgctgctactagatctgcattaggtttgccatttgtttggaggccagctttttcttttattatcgcttttatgactgttatgggtatgacaatcgctttcgcaaaggatatctctgatattgaaggtgacgctaaatacggtgtttcaactgttgctacaaaattgggtgcgagaaacatgactttcgttgtttctggtgttttgttgttgaactatgctgtttctatctcaatcggtattatttggccacaagtttttaaatctaacatcacgatcttgtcacatgctatcttggcattcatgttgatcttcagaacaagagaattagctttcccaaattctgcttctgcaccatcaagacaatttttcgagtttatttggttgttgtactacgctgaatattttgtttacgtttttatttga

SEQ ID NO: 334 - protein, 316 aa, synthetic construct
IEGSPHHESDNSIATKILNFGHTCWKLQRPYVVKGMISIACGLFGRELFNNPHLFSWGLMWKATFALVPILSFNFFAACMNQIYDVDIDRINKPDLPLVSGEMSIETAWILSIIVALTGLIVTIKLKSAPLFVGIYIFGIFAGFAYSVPPIRWKQYPFTNFLITISSHVGLAFTSYAATRSALGLPFVWRPAFSFIIAFMTVMGMTIAFAKDISDIEGDAKYGVSTVATKLGARNMTFVVSGVLLLNYAVSISIGIIWPQVFKSNITILSHAILAFMLIFRTRELAFPNSASAPSRQFFEFIWLLYYAEYFVYVFI

SEQ ID NO: 335 - DNA, 951 bp, synthetic construct
  source 1..951: mol_type = other DNA
attgaaggttcaccacatcatgaatctgttaactcaatcgcaactaaaattttgaactttggtcatacatgttggaaattgcaaagaccatacgttgttaagggtatgatttctattgcttgtggtttatttggtagagaattgtttaataacagacatttgttttcttggggtttgatgtggaaagcaactttcgcattagttccaatcttgtcttttaatttctttgctgcatgtatgaaccaaatatatgatgttgatattgatagaattaataagccagatttgccattggtttctggtgaaatgtcaatcgaaactgcttggattttatctatcatcgttgcattgactggtttgatcgttacaatttggttaaaatcagctccattgttcgttggtatatatatcttcggtaccttcgctggttttgcatactctgttccaccaattagatggaagcaatacccttttactaatttcttgatcacaatttcttcacatgttggtttggcttttacttcttacgctgctactacatctgcattaggtttgccatttgtttggaggccagctttttcttttattatcgcttttatgactgttatgggtatgacaatcgctttcgcaaaggatatctctgatattgaaggtgacgctaaatacggtgtttcaactgttgctacaaaattgggtgcaagaaacatgactttcgttgtttctggtgttttgttgttgaactatgctgtttctatctcaatcggtattatttggccacaagtttttaaatctaacatcatgatcttgtcacatgctatcttggcattcatgttgatcttcagaacaagagaattagctttggcaaattatgaatctgcaccatcaagacaatttttcgagtttatttggttgttgtattacgctgaatattttgtttacgtttttatttga

SEQ ID NO: 336 - protein, 316 aa, synthetic construct
IEGSPHHESVNSIATKILNFGHTCWKLQRPYVVKGMISIACGLFGRELFNNRHLFSWGLMWKATFALVPILSFNFFAACMNQIYDVDIDRINKPDLPLVSGEMSIETAWILSIIVALTGLIVTIWLKSAPLFVGIYIFGTFAGFAYSVPPIRWKQYPFTNFLITISSHVGLAFTSYAATTSALGLPFVWRPAFSFIIAFMTVMGMTIAFAKDISDIEGDAKYGVSTVATKLGARNMTFVVSGVLLLNYAVSISIGIIWPQVFKSNIMILSHAILAFMLIFRTRELALANYESAPSRQFFEFIWLLYYAEYFVYVFI

SEQ ID NO: 337 - DNA, 951 bp, synthetic construct
  source 1..951: mol_type = other DNA
attgaaggttcaccacatcatgaatctgttaactcaatcgcaactaaaattttgaactttggtcatacatgttggaaattgcaaagaccatacgttgttgagggtatgatttctattgcttgtggtttatttggtagagaattgttgaataacagacatttgttttcttggggtttgatgtggaaagcatttttcgcattagttccaatcttgtcttttaatttctttgctgcaatcatgaaccaaatatatgatgttgatattgatagaattaataagccagatttgccattggtttctggtgaaatgtcaatcgaaactgcttggattttatctatcatcgttgcattgactggtttgatcgttacaattaaattaaaatcagctccattgttcgtttttatatatatcttcggtatcttcgctggttttgcatactctgttccaccaattagatggaagcaatacccttttactaatttcttgatcacaatttcttcacatgttggtttggcttttacttcttactcagctactacatctgcattaggtttgccatttgtttggaggccagctttttcttttattatcgcttttatgactgttatgggtatgacaatcgctttcgcaaaggatatctctgatattgaaggtgacgctaaatacggtgtttcaactgttgctacaaaattgggtgcaagaaacatgactttcgttgtttctggtgttttgttgttgaactatttggtttctatctcaatcggtattatttggccacaagtttttaaatctaacatcatgatcttgtcacatgctatcttggcattctgtttgatcttccaaacaagagaattagctttggcaaattatgcttctgcaccatcaagacaatttttcgagtttatttggttgttgtactacgctgaatattttgtttacgtttttatttga

SEQ ID NO: 338 - protein, 316 aa, synthetic construct
IEGSPHHESVNSIATKILNFGHTCWKLQRPYVVEGMISIACGLFGRELLNNRHLFSWGLMWKAFFALVPILSFNFFAAIMNQIYDVDIDRINKPDLPLVSGEMSIETAWILSIIVALTGLIVTIKLKSAPLFVFIYIFGIFAGFAYSVPPIRWKQYPFTNFLITISSHVGLAFTSYSATTSALGLPFVWRPAFSFIIAFMTVMGMTIAFAKDISDIEGDAKYGVSTVATKLGARNMTFVVSGVLLLNYLVSISIGIIWPQVFKSNIMILSHAILAFCLIFQTRELALANYASAPSRQFFEFIWLLYYAEYFVYVFI

SEQ ID NO: 339 - DNA, 951 bp, synthetic construct
  source 1..951: mol_type = other DNA
attgaaggttcaccacattgtgaatctgttaactcaatcgcaactaaaattttgaactttggtcatacatgttggaaattgcaaagaccatacgttgttaagggtatgatttctattgctgctggtttatttggtaaagaattgtttaataacagacatttgttttcttggggtttgatgtggaaagcaactttcgcattagttccaatcttgtcttttaatttctttgctgcaatcatgaaccaaatatatgatgttgatattgatagaattaataagccagatttgccattggtttctggtgaaatgtcaatcgaaactgcttggattttatctatcatcgttgcattgactggtttgatcgttacaatttggttaaaatcagctccattgttcgtttttatatatatcttcggtatcttcgctggttttgcatactctgttccaccaattagatggaagcaatacccttttactaatttcttgatcacaatttcttcacatgttggtttggcttttacttcttactcagctactacatctgcattaggtttgccatttgtttggtctccagctttttcttttattatcgcttttatgactgttatgggtggtacaatcgctttcgcaaaggatatctctgatattgaaggtgacgctaaatacggtgtttcaactgttgctacaaaattgggtgcaagaaacatgactttcgttgtttctggtgttttgttgttgaactatttggtttctatctcaatcggtattatttggccacaagtttttaaatctaacatcatgatcttgtcacatgctatcttggcattcgctttgatcttccaaacaagagaattagctttggcaaattatgcttctgcaccagctagacaatttttcgagtttatttggctgttgtattcccgtgaatcttttgtttacgtttttatttga

SEQ ID NO: 340 - protein, 316 aa, synthetic construct
IEGSPHCESVNSIATKILNFGHTCWKLQRPYVVKGMISIAAGLFGKELFNNRHLFSWGLMWKATFALVPILSFNFFAAIMNQIYDVDIDRINKPDLPLVSGEMSIETAWILSIIVALTGLIVTIWLKSAPLFVFIYIFGIFAGFAYSVPPIRWKQYPFTNFLITISSHVGLAFTSYSATTSALGLPFVWSPAFSFIIAFMTVMGGTIAFAKDISDIEGDAKYGVSTVATKLGARNMTFVVSGVLLLNYLVSISIGIIWPQVFKSNIMILSHAILAFALIFQTRELALANYASAPARQFFEFIWLLYSRESFVYVFI

SEQ ID NO: 341 - DNA, 951 bp, synthetic construct
  source 1..951: mol_type = other DNA
attgaaggttcaggtcattgtgaatctgttaactcaatcgcaactaaaattttgaactttggtcatacatgttggaaattgcaaagaccatacgttgttaagggtatgatttctattgctggtggtttatttggtagagaattgtttaataacagacatttgttttcttggggtttgatgtggaaagcatttttcgcattagttccaatcttgtcttttaatttctttgctgcaatcatgaaccaaatatatgatgttgatattgatagaattaataagccagatttgccattggtttctggtgaaatgtcaatcgaaactgcttggattttatctatcatcgttgcattgactggtttgatcgttacaatttggttaaaatcagctccattgttcgttggtatatatatcttcggtatcttcgctggttttgcatactctgttccaccaattagatggaagcaatacccttttactaatttcttgatcacaatttcttcacatgttggtttggcttttacttcttactcagctactacatctgcattaggtttgccatttgtttggaggccagctttttcttttattatcgcttttatgactgttatgggtatgacaatcgctttcgcaaaggatatctctgatattgaaggtgacgctaaatacggtgtttcaactgttgctacaaaattgggtgcaagaaacatgactttcgttgtttctggtgttttgttgttgaactatgtggtttctatctcaatcggtattatttggccacaagtttttaaatctaacatcatgatcttgtcacatgctatcttggcattctgtttgatcttacaaacaagagaattagctttggcaaattatgaatctgcaccatctagacaatttttcgagtttatttggttgttgtactacgctgaatattttgtttacgtttttatttga

SEQ ID NO: 342 - protein, 316 aa, synthetic construct
IEGSGHCESVNSIATKILNFGHTCWKLQRPYVVKGMISIAGGLFGRELFNNRHLFSWGLMWKAFFALVPILSFNFFAAIMNQIYDVDIDRINKPDLPLVSGEMSIETAWILSIIVALTGLIVTIWLKSAPLFVGIYIFGIFAGFAYSVPPIRWKQYPFTNFLITISSHVGLAFTSYSATTSALGLPFVWRPAFSFIIAFMTVMGMTIAFAKDISDIEGDAKYGVSTVATKLGARNMTFVVSGVLLLNYVVSISIGIIWPQVFKSNIMILSHAILAFCLILQTRELALANYESAPSRQFFEFIWLLYYAEYFVYVFI

SEQ ID NO: 343 - DNA, 951 bp, synthetic construct
  source 1..951: mol_type = other DNA
attgaaggttcaggtcatcatgaatctgataactcaatcgcaactaaaattttgaactttggtcatacatgttggaaattgcaaagaccatacgttgttaagggtatgatttctattgcttgtggtttatttggtagagaattgtttaataacagacatttgttttcttggggtttgatgtggaaagcaactttcgcattagttccaatcttgtcttttaatttctttgctgcatgtatgaaccaaatatatgatgttgatattgatagaattaataagccagatttgccattggtttctggtgaaatgtcaatcgaaactgcttggattttatctatcatcgttgcattgactggtttgatcgttacaattaaattaaaatcagctccattgttcgtttttatatatatcttcggtatcttcgctggttttgcatactctgttccaccaattagattgaagcaatacccttttactaatttcttgatcacaacttcttcacatgttggtttggcttttacttcttactcagctactacatctgcattaggtttgccatttgtttggaggccagctttttcttttattatcgcttttatgactgttatgggtatgacaatcgctttcgcaaaggatatctctgatattgaaggtgacgctaaatacggtgtttcaactgttgctacaaaattgggtgcaagaaacatgactttcgttgtttctggtgttttgttgttgaactatttggtttctatctcaatcggtattatttggccacaagtttttaaatctaacatcatgatcttgtcacatgctatcttggcattctgtttgatcttcagaacaagagaattagctttggcaaattatgaatctgcaccagctagacaatttttcgagtttatttggttgttgtactacgctgaatattttgtttacgtttttatttga

SEQ ID NO: 344 - protein, 316 aa, synthetic construct
IEGSGHHESDNSIATKILNFGHTCWKLQRPYVVKGMISIACGLFGRELFNNRHLFSWGLMWKATFALVPILSFNFFAACMNQIYDVDIDRINKPDLPLVSGEMSIETAWILSIIVALTGLIVTIKLKSAPLFVFIYIFGIFAGFAYSVPPIRLKQYPFTNFLITTSSHVGLAFTSYSATTSALGLPFVWRPAFSFIIAFMTVMGMTIAFAKDISDIEGDAKYGVSTVATKLGARNMTFVVSGVLLLNYLVSISIGIIWPQVFKSNIMILSHAILAFCLIFRTRELALANYESAPARQFFEFIWLLYYAEYFVYVFI

SEQ ID NO: 345 - DNA, 951 bp, synthetic construct
  source 1..951: mol_type = other DNA
attgaaggttcaccacattgtgaatctgataactcaatcgcaactaaaattttgaactttggtcatacatgttggaaattgcaaagaccatacgttgttaagggtatgatttctattgcttgtggtttatttggtaaagaattgtttaataacagacatttgttttcttggggtttgatgtggaaagcaactttcgcattagttccaatcttgtcttttaatttctttgctgcaatcatgaaccaaatatatgatgttgatattgatagagttaataagccagatttgccattggtttctggtgaaatgtcaatcgaaactgcttggattttatctatcatcgttgcattgactggtttgatcgttacaattaaattaaaatcagctccattgttcgtttttatatatatcttcggtatcttcgctggttttgcatactctgttccaccaattagattgaagcaatacccttttactaatttcttgatcacaatttcttcacatgttggtttggcttttactgtttacactgctactacatctgcattaggtttgccatttgtttggaggccagctttttcttttactatcgcttttatgactgttatgggtggtacaatcgctttcgcaaaggatatctctgatattgaaggtgacgctaaatacggtgtttcaactgttgctacaaaattgggtgcaagaaacatgactttcgttgtttctggtgttttgttgttgaactatgctgtttctatctcaatcggtattatttggccacaagtttttaaatctaacatcatgatcttgtcacatgctatcttggcattcatgttgatcttccaaacaagagaattagctttggcaaattatgaatctgcaccatcaagacaatttttcgagtttatttggttgttgtattacgctgaaccttttgtttacgtttttatttga

SEQ ID NO: 346 - protein, 316 aa, synthetic construct
IEGSPHCESDNSIATKILNFGHTCWKLQRPYVVKGMISIACGLFGKELFNNRHLFSWGLMWKATFALVPILSFNFFAAIMNQIYDVDIDRVNKPDLPLVSGEMSIETAWILSIIVALTGLIVTIKLKSAPLFVFIYIFGIFAGFAYSVPPIRLKQYPFTNFLITISSHVGLAFTVYTATTSALGLPFVWRPAFSFTIAFMTVMGGTIAFAKDISDIEGDAKYGVSTVATKLGARNMTFVVSGVLLLNYAVSISIGIIWPQVFKSNIMILSHAILAFMLIFQTRELALANYESAPSRQFFEFIWLLYYAEPFVYVFI

SEQ ID NO: 347 - DNA, 951 bp, synthetic construct
  source 1..951: mol_type = other DNA
attgaaggttcaccacattgtgaatctgataactcaatcgcaactaaaattttgaactttggtcatacatgttggaaattgcaaagaccatacgttgttaagggtatgatttctattgctgctggtttatttggtagagaattgtttaataacagacatttgttttcttggggtttgatgtggaaagcatttttcgcattagttccaatcttgtcttttaatttctttgctgcaatcatgaaccaaatatatgatgttgatattgatagaattaataagccagatttgccattggtttctggtgaaatgtcaatcgaaactgcttggattttatctatcatcgttgcattgactggtttgatcgttacaatttggttaaaatcagctccattgttcgttggtatatatatcttcggtatcttcgctggttttgcatactctgttccaccaattagattgaagcaatacccttttactaatttcttgatcacaatttcttcacatgttggtttggcttttactacttactcagctactagatctgcattaggtttgccatttgtttggtctccagctttttcttttattatcgcttttatgactgttatgggtggtacaatcgctttcgcaaaggatatctctgatattggaggtgacgctaaatacggtgtttcaactgttgctacaaaattgggtgcaagaaacatgactttcgttgtttctggtgttttgttgttgaactatttggtttctatctcaatcggtattatttggccacaagtttttaaatctaacatcatgatcttgtcacatgctatcttggcattctgtttgatcttccaaacaagagaattagctttggcaaattatgcttctgcaccatcaagacaatttttcgagtttatttggttgttgtactacgctgaatattttgtttacgtttttatttga

SEQ ID NO: 348 - protein, 316 aa, synthetic construct
IEGSPHCESDNSIATKILNFGHTCWKLQRPYVVKGMISIAAGLFGRELFNNRHLFSWGLMWKAFFALVPILSFNFFAAIMNQIYDVDIDRINKPDLPLVSGEMSIETAWILSIIVALTGLIVTIWLKSAPLFVGIYIFGIFAGFAYSVPPIRLKQYPFTNFLITISSHVGLAFTTYSATRSALGLPFVWSPAFSFIIAFMTVMGGTIAFAKDISDIGGDAKYGVSTVATKLGARNMTFVVSGVLLLNYLVSISIGIIWPQVFKSNIMILSHAILAFCLIFQTRELALANYASAPSRQFFEFIWLLYYAEYFVYVFI

SEQ ID NO: 349 - DNA, 951 bp, synthetic construct
  source 1..951: mol_type = other DNA
attgaaggttcagggcatcatgaatcttggaactcaatcgcaactaaaattttgaactttggtcatacatgttggaaattgcaaagaccatacgttgttaagggtatgatttctattgctggcggtttatttggtagagaattgatgaataacagacatttgttttcttggggtttgatggcgaaagcatggttcgcattagttccaatcttgtcttttaatttctttgctgcagcaatgaaccaaatatatgatgttgatattgatagaattaataagccagatttgccattggtttctggtgaaatgtcaatcgaaactgcttggattttatctatcatcgttgcattgactggtttgatcgttacaattatgttaaaatcagctccattgttcgtttttatatatatcttcggtatcttcgctggttttgcatactctgttccaccaattagatggaagcaataccctgggactaatttcttgatcacaatttcttcacatgttggtttggcttttactgcgtacgcagctactctgtctgcattaggtttgccatttgtttggtcgccagcttttgtctttattatcgcttttatgactgttatgggtatgacaatcgctttcgcaaaggatatctctgatattgaaggtgacgctaaatacggtgtttcaactgttgctacaaaattgggtgcaagaaagatgacttgggttgtttctggtgttttgttgttgaactatttggtttctatctcaatcggtattatttggccacaagtttttaaatctaacatcatgatcttgtcacatgctatcttggcattcgcgttgatcttccaaacaagagacttagctttggcaaattatgcttctgtcccatcaagacaatttttcgagtttatttggttgttgtactacgctgaatattttgtttacgtttttatttga

SEQ ID NO: 350 - protein, 316 aa, synthetic construct
IEGSGHHESWNSIATKILNFGHTCWKLQRPYVVKGMISIAGGLFGRELMNNRHLFSWGLMAKAWFALVPILSFNFFAAAMNQIYDVDIDRINKPDLPLVSGEMSIETAWILSIIVALTGLIVTIMLKSAPLFVFIYIFGIFAGFAYSVPPIRWKQYPGTNFLITISSHVGLAFTAYAATLSALGLPFVWSPAFVFIIAFMTVMGMTIAFAKDISDIEGDAKYGVSTVATKLGARKMTWVVSGVLLLNYLVSISIGIIWPQVFKSNIMILSHAILAFALIFQTRDLALANYASVPSRQFFEFIWLLYYAEYFVYVFI

SEQ ID NO: 351 - DNA, 951 bp, synthetic construct
  source 1..951: mol_type = other DNA
attgaaggttcagggcatcatgaatctgtgaactcaatcgcaactaaaattttgaactttggtcatacatgttggaaattgcaaagaccatacgttgttaagggtatgatttctattgcttcgggtttatttggtagagaattgatgaataacagacatttgttttcttggggtttgatggcgaaagcactgttcgcattagttccaatcttgtcttttaatttctttgctgcatgcatgaaccaaatatatgatgttgatattgatagaattaataagccagatttgccattggtttctggtgaaatgtcaatcgaaactgcttggattttatctatcatcgttgcattgactggtttgatcgttacaattgtcttaaaatcagctccattgttcgtttttatatatatcttcggtatcttcgctggttttgcatactctgttccaccaattagatggaagcaataccctgggactaatttcttgatcacaatttcttcacatgttggtttggcttttactgtgtacgcagctactgtctctgcattaggtttgccatttgtttggtcgccagcttttgtctttattatcgcttttatgactgttatgggtatgacaatcgctttcgcaaaggatatctctgatattgaaggtgacgctaaatacggtgtttcaactgttgctacaaaattgggtgcaagatgcatgactttggttgtttctggtgttttgttgttgaactatttggtttctatctcaatcggtattatttggccacaagtttttaaatctaacatcatgatcttgtcacatgctatcttggcattcgcgttgatcttccaaacaagaaagttagctttggcaaattatgcttctaagccatcaagacaatttttcgagtttatttggttgttgtactacgctgaatattttgtttacgtttttatttga

SEQ ID NO: 352 - protein, 316 aa, synthetic construct
IEGSGHHESVNSIATKILNFGHTCWKLQRPYVVKGMISIASGLFGRELMNNRHLFSWGLMAKALFALVPILSFNFFAACMNQIYDVDIDRINKPDLPLVSGEMSIETAWILSIIVALTGLIVTIVLKSAPLFVFIYIFGIFAGFAYSVPPIRWKQYPGTNFLITISSHVGLAFTVYAATVSALGLPFVWSPAFVFIIAFMTVMGMTIAFAKDISDIEGDAKYGVSTVATKLGARCMTLVVSGVLLLNYLVSISIGIIWPQVFKSNIMILSHAILAFALIFQTRKLALANYASKPSRQFFEFIWLLYYAEYFVYVFI

SEQ ID NO: 353 - DNA, 951 bp, synthetic construct
  source 1..951: mol_type = other DNA
attgaaggttcagggcatcatgaatctgtgaactcaatcgcaactaaaattttgaactttggtcatacatgttggaaattgcaaagaccatacgttgttaagggtatgatttctattgctgcgggtttatttggtagagaattgctgaataacagacatttgttttcttggggtttgatggcgaaagcagggttcgcattagttccaatcttgtcttttaatttctttgctgcatgcatgaaccaaatatatgatgttgatattgatagaattaataagccagatttgccattggtttctggtgaaatgtcaatcgaaactgcttggattttatctatcatcgttgcattgactggtttgatcgttacaattgtcttaaaatcagctccattgttcgtttttatatatatcttcggtatcttcgctggttttgcatactctgttccaccaattagatggaagcaataccctgggactaatttcttgatcacaatttcttcacatgttggtttggcttttactgcgtacacggctactgtctctgcattaggtttgccatttgtttggtcgccagcttttgtctttattatcgcttttatgactgttatgggtatgacaatcgctttcgcaaaggatatctctgatattgaaggtgacgctaaatacggtgtttcaactgttgctacaaaattgggtgcaagaaagatgacttgggttgtttctggtgttttgttgttgaactatttggtttctatctcaatcggtattatttggccacaagtttttaaatctaacatcatgatcttgtcacatgctatcttggcattcgcgttgatcttccaaacaagagacttagctttggcaaattatgcttctggcccatcaagacaatttttcgagtttatttggttgttgtactacgctgaatattttgtttacgtttttatttga

SEQ ID NO: 354 - protein, 316 aa, synthetic construct
IEGSGHHESVNSIATKILNFGHTCWKLQRPYVVKGMISIAAGLFGRELLNNRHLFSWGLMAKAGFALVPILSFNFFAACMNQIYDVDIDRINKPDLPLVSGEMSIETAWILSIIVALTGLIVTIVLKSAPLFVFIYIFGIFAGFAYSVPPIRWKQYPGTNFLITISSHVGLAFTAYTATVSALGLPFVWSPAFVFIIAFMTVMGMTIAFAKDISDIEGDAKYGVSTVATKLGARKMTWVVSGVLLLNYLVSISIGIIWPQVFKSNIMILSHAILAFALIFQTRDLALANYASGPSRQFFEFIWLLYYAEYFVYVFI

SEQ ID NO: 355 - DNA, 951 bp, synthetic construct
  source 1..951: mol_type = other DNA
attgaaggttcaccacatcatgaatctgataactcaatcgcaactaaaattttgaactttggtcatacatgttggaaattgcaaagaccatacgttgttaagggtatgatttctattgctgcgggtttatttggtagagaattgctgaataacagacatttgttttcttggggtttgatggtgaaagcaacgttcgcattagttccaatcttgtcttttaatttctttgctgcagcaatgaaccaaatatatgatgttgatattgatagaattaataagccagatttgccattggtttctggtgaaatgtcaatcgaaactgcttggattttatctatcatcgttgcattgactggtttgatcgttacaattatgttaaaatcagctccattgttcgtttttatatatatcttcggtatcttcgctggttttgcatactctgttccaccaattagatggaagcaataccctgggactaatttcttgatcacaatttcttcacatgttggtttggcttttactgcgtacacggctactctgtctgcattaggtttgccatttgtttgggcgccagcttttgtctttattatcgcttttatgactgttatgggtatgacaatcgctttcgcaaaggatatctctgatattgaaggtgacgctaaatacggtgtttcaactgttgctacaaaattgggtgcaagatgcatgacttgggttgtttctggtgttttgttgttgaactatttggtttctatctcaatcggtattatttggccacaagtttttaaatctaacatcatgatcttgtcacatgctatcttggcattcgcgttgatcttccaaacaagagacttagctttggcaaattatgcttctggcccatcaagacaatttttcgagtttatttggttgttgtactacgctgaatattttgtttacgtttttatttga

SEQ ID NO: 356 - protein, 316 aa, synthetic construct
IEGSPHHESDNSIATKILNFGHTCWKLQRPYVVKGMISIAAGLFGRELLNNRHLFSWGLMVKATFALVPILSFNFFAAAMNQIYDVDIDRINKPDLPLVSGEMSIETAWILSIIVALTGLIVTIMLKSAPLFVFIYIFGIFAGFAYSVPPIRWKQYPGTNFLITISSHVGLAFTAYTATLSALGLPFVWAPAFVFIIAFMTVMGMTIAFAKDISDIEGDAKYGVSTVATKLGARCMTWVVSGVLLLNYLVSISIGIIWPQVFKSNIMILSHAILAFALIFQTRDLALANYASGPSRQFFEFIWLLYYAEYFVYVFI

SEQ ID NO: 357 - DNA, 951 bp, synthetic construct
  source 1..951: mol_type = other DNA
attgaaggttcagggcatcatgaatctctgaactcaatcgcaactaaaattttgaactttggtcatacatgttggaaattgcaaagaccatacgttgttaagggtatgatttctattgctgcgggtttatttggtagagaattgctgaataacagacatttgttttcttggggtttgatggcgaaagcaacgttcgcattagttccaatcttgtcttttaatttctttgctgcatgcatgaaccaaatatatgatgttgatattgatagaattaataagccagatttgccattggtttctggtgaaatgtcaatcgaaactgcttggattttatctatcatcgttgcattgactggtttgatcgttacaattatgttaaaatcagctccattgttcgtttttatatatatcttcggtatcttcgctggttttgcatactctgttccaccaattagatggaagcaataccctgggactaatttcttgatcacaatttcttcacatgttggtttggcttttactgcgtacacggctactcgctctgcattaggtttgccatttgtttggtcgccagcttttgcgtttattatcgcttttatgactgttatgggtatgacaatcgctttcgcaaaggatatctctgatattgaaggtgacgctaaatacggtgtttcaactgttgctacaaaattgggtgcaagaaagatgacttgggttgtttctggtgttttgttgttgaactatttggtttctatctcaatcggtattatttggccacaagtttttaaatctaacatcatgatcttgtcacatgctatcttggcattcatgttgatcttccaaacaagaaagttagctttggcaaattatgcttctgtcccatcaagacaatttttcgagtttatttggttgttgtactacgctgaatattttgtttacgtttttatttga

SEQ ID NO: 358 - protein, 316 aa, synthetic construct
IEGSGHHESLNSIATKILNFGHTCWKLQRPYVVKGMISIAAGLFGRELLNNRHLFSWGLMAKATFALVPILSFNFFAACMNQIYDVDIDRINKPDLPLVSGEMSIETAWILSIIVALTGLIVTIMLKSAPLFVFIYIFGIFAGFAYSVPPIRWKQYPGTNFLITISSHVGLAFTAYTATRSALGLPFVWSPAFAFIIAFMTVMGMTIAFAKDISDIEGDAKYGVSTVATKLGARKMTWVVSGVLLLNYLVSISIGIIWPQVFKSNIMILSHAILAFMLIFQTRKLALANYASVPSRQFFEFIWLLYYAEYFVYVFI

SEQ ID NO: 359 - DNA, 951 bp, synthetic construct
  source 1..951: mol_type = other DNA
attgaaggttcagggcatcatgaatcttggaactcaatcgcaactaaaattttgaactttggtcatacatgttggaaattgcaaagaccatacgttgttaagggtatgatttctattgcttcgggtttatttggtagagaattgctgaataacagacatttgttttcttggggtttgatggcgaaagcaacgttcgcattagttccaatcttgtcttttaatttctttgctgcagcaatgaaccaaatatatgatgttgatattgatagaattaataagccagatttgccattggtttctggtgaaatgtcaatcgaaactgcttggattttatctatcatcgttgcattgactggtttgatcgttacaattatgttaaaatcagctccattgttcgtttttatatatatcttcggtatcttcgctggttttgcatactctgttccaccaattagatggaagcaataccctgggactaatttcttgatcacaatttcttcacatgttggtttggcttttactgcgtacgcagctactctgtctgcattaggtttgccatttgtttggcagccagcttttctgtttattatcgcttttatgactgttatgggtatgacaatcgctttcgcaaaggatatctctgatattgaaggtgacgctaaatacggtgtttcaactgttgctacaaaattgggtgcaagatgcatgactttggttgtttctggtgttttgttgttgaactatttggtttctatctcaatcggtattatttggccacaagtttttaaatctaacatcatgatcttgtcacatgctatcttggcattcatgttgatcttccaaacaagaaagttagctttggcaaattatgcttctgtcccatcaagacaatttttcgagtttatttggttgttgtactacgctgaatattttgtttacgtttttatttga

SEQ ID NO: 360 - protein, 316 aa, synthetic construct
IEGSGHHESWNSIATKILNFGHTCWKLQRPYVVKGMISIASGLFGRELLNNRHLFSWGLMAKATFALVPILSFNFFAAAMNQIYDVDIDRINKPDLPLVSGEMSIETAWILSIIVALTGLIVTIMLKSAPLFVFIYIFGIFAGFAYSVPPIRWKQYPGTNFLITISSHVGLAFTAYAATLSALGLPFVWQPAFLFIIAFMTVMGMTIAFAKDISDIEGDAKYGVSTVATKLGARCMTLVVSGVLLLNYLVSISIGIIWPQVFKSNIMILSHAILAFMLIFQTRKLALANYASVPSRQFFEFIWLLYYAEYFVYVFI

SEQ ID NO: 361 - DNA, 951 bp, synthetic construct
  source 1..951: mol_type = other DNA
attgaaggttcagggcatcatgaatctctgaactcaatcgcaactaaaattttgaactttggtcatacatgttggaaattgcaaagaccatacgttgttaagggtatgatttctattgctggcggtttatttggtagagaattgcgcaataacagacatttgttttcttggggtttgatggcgaaagcaacgttcgcattagttccaatcttgtcttttaatttctttgctgcatgcatgaaccaaatatatgatgttgatattgatagaattaataagccagatttgccattggtttctggtgaaatgtcaatcgaaactgcttggattttatctatcatcgttgcattgactggtttgatcgttacaatttggttaaaatcagctccattgttcgtttttatatatatcttcggtatcttcgctggttttgcatactctgttccaccaattagatggaagcaataccctgggactaatttcttgatcacaatttcttcacatgttggtttggcttttactacgtacacggctactcgctctgcattaggtttgccatttgtttggtcgccagcttttctgtttattatcgcttttatgactgttatgggtatgacaatcgctttcgcaaaggatatctctgatattgaaggtgacgctaaatacggtgtttcaactgttgctacaaaattgggtgcaagaaagatgactttggttgtttctggtgttttgttgttgaactatttggtttctatctcaatcggtattatttggccacaagtttttaaatctaacatcatgatcttgtcacatgctatcttggcattcgcgttgatcttccaaacaagagacttagctttggcaaattatgcttctggcccatcaagacaatttttcgagtttatttggttgttgtactacgctgaatattttgtttacgtttttatttga

SEQ ID NO: 362 - protein, 316 aa, synthetic construct
IEGSGHHESLNSIATKILNFGHTCWKLQRPYVVKGMISIAGGLFGRELRNNRHLFSWGLMAKATFALVPILSFNFFAACMNQIYDVDIDRINKPDLPLVSGEMSIETAWILSIIVALTGLIVTIWLKSAPLFVFIYIFGIFAGFAYSVPPIRWKQYPGTNFLITISSHVGLAFTTYTATRSALGLPFVWSPAFLFIIAFMTVMGMTIAFAKDISDIEGDAKYGVSTVATKLGARKMTLVVSGVLLLNYLVSISIGIIWPQVFKSNIMILSHAILAFALIFQTRDLALANYASGPSRQFFEFIWLLYYAEYFVYVFI

SEQ ID NO: 363 - DNA, 951 bp, synthetic construct
  source 1..951: mol_type = other DNA
attgaaggttcagtgcatcatgaatctctgaactcaatcgcaactaaaattttgaactttggtcatacatgttggaaattgcaaagaccatacgttgttaagggtatgatttctattgctgcgggtttatttggtagagaattgctgaataacagacatttgttttcttggggtttgatggcgaaagcatggttcgcattagttccaatcttgtcttttaatttctttgctgcagcaatgaaccaaatatatgatgttgatattgatagaattaataagccagatttgccattggtttctggtgaaatgtcaatcgaaactgcttggattttatctatcatcgttgcattgactggtttgatcgttacaattgtcttaaaatcagctccattgttcgtttttatatatatcttcggtatcttcgctggttttgcatactctgttccaccaattagatggaagcaataccctgggactaatttcttgatcacaatttcttcacatgttggtttggcttttactgtgtacacggctactcgctctgcattaggtttgccatttgtttgggcgccagcttttgcgtttattatcgcttttatgactgttatgggtatgacaatcgctttcgcaaaggatatctctgatattgaaggtgacgctaaatacggtgtttcaactgttgctacaaaattgggtgcaagatgcatgactttggttgtttctggtgttttgttgttgaactatttggtttctatctcaatcggtattatttggccacaagtttttaaatctaacatcatgatcttgtcacatgctatcttggcattcgcgttgatcttccaaacaagacgcttagctttggcaaattatgcttctggcccatcaagacaatttttcgagtttatttggttgttgtactacgctgaatattttgtttacgtttttatttga

SEQ ID NO: 364 - protein, 316 aa, synthetic construct
IEGSVHHESLNSIATKILNFGHTCWKLQRPYVVKGMISIAAGLFGRELLNNRHLFSWGLMAKAWFALVPILSFNFFAAAMNQIYDVDIDRINKPDLPLVSGEMSIETAWILSIIVALTGLIVTIVLKSAPLFVFIYIFGIFAGFAYSVPPIRWKQYPGTNFLITISSHVGLAFTVYTATRSALGLPFVWAPAFAFIIAFMTVMGMTIAFAKDISDIEGDAKYGVSTVATKLGARCMTLVVSGVLLLNYLVSISIGIIWPQVFKSNIMILSHAILAFALIFQTRRLALANYASGPSRQFFEFIWLLYYAEYFVYVFI

SEQ ID NO: 365 - DNA, 951 bp, synthetic construct
  source 1..951: mol_type = other DNA
attgaaggttcagggcatcatgaatctgtgaactcaatcgcaactaaaattttgaactttggtcatacatgttggaaattgcaaagaccatacgttgttaagggtatgatttctattgctgcgggtttatttggtagagaattgctgaataacagacatttgttttcttggggtttgatggcgaaagcaatgttcgcattagttccaatcttgtcttttaatttctttgctgcatgcatgaaccaaatatatgatgttgatattgatagaattaataagccagatttgccattggtttctggtgaaatgtcaatcgaaactgcttggattttatctatcatcgttgcattgactggtttgatcgttacaattgtcttaaaatcagctccattgttcgtttttatatatatcttcggtatcttcgctggttttgcatactctgttccaccaattagatggaagcaataccctgggactaatttcttgatcacaatttcttcacatgttggtttggcttttactgcgtacacggctactctgtctgcattaggtttgccatttgtttggtcgccagcttttgtctttattatcgcttttatgactgttatgggtatgacaatcgctttcgcaaaggatatctctgatattgaaggtgacgctaaatacggtgtttcaactgttgctacaaaattgggtgcaagatgcatgacttgggttgtttctggtgttttgttgttgaactatttggtttctatctcaatcggtattatttggccacaagtttttaaatctaacatcatgatcttgtcacatgctatcttggcattcatgttgatcttccaaacaagacgcttagctttggcaaattatgcttctggcccatcaagacaatttttcgagtttatttggttgttgtactacgctgaatattttgtttacgtttttatttga

SEQ ID NO: 366 - protein, 316 aa, synthetic construct
IEGSGHHESVNSIATKILNFGHTCWKLQRPYVVKGMISIAAGLFGRELLNNRHLFSWGLMAKAMFALVPILSFNFFAACMNQIYDVDIDRINKPDLPLVSGEMSIETAWILSIIVALTGLIVTIVLKSAPLFVFIYIFGIFAGFAYSVPPIRWKQYPGTNFLITISSHVGLAFTAYTATLSALGLPFVWSPAFVFIIAFMTVMGMTIAFAKDISDIEGDAKYGVSTVATKLGARCMTWVVSGVLLLNYLVSISIGIIWPQVFKSNIMILSHAILAFMLIFQTRRLALANYASGPSRQFFEFIWLLYYAEYFVYVFI

SEQ ID NO: 367 - DNA, 951 bp, synthetic construct
  source 1..951: mol_type = other DNA
attgaaggttcagggcatcatgaatcttggaactcaatcgcaactaaaattttgaactttggtcatacatgttggaaattgcaaagaccatacgttgttaagggtatgatttctattgctgcgggtttatttggtagagaattgctgaataacagacatttgttttcttggggtttgatggcgaaagcagggttcgcattagttccaatcttgtcttttaatttctttgctgcatgcatgaaccaaatatatgatgttgatattgatagaattaataagccagatttgccattggtttctggtgaaatgtcaatcgaaactgcttggattttatctatcatcgttgcattgactggtttgatcgttacaatttggttaaaatcagctccattgttcgtttttatatatatcttcggtatcttcgctggttttgcatactctgttccaccaattagatggaagcaataccctgggactaatttcttgatcacaatttcttcacatgttggtttggcttttactacgtacacggctactcgctctgcattaggtttgccatttgtttggtcgccagcttttctgtttattatcgcttttatgactgttatgggtatgacaatcgctttcgcaaaggatatctctgatattgaaggtgacgctaaatacggtgtttcaactgttgctacaaaattgggtgcaagatgcatgacttgggttgtttctggtgttttgttgttgaactatttggtttctatctcaatcggtattatttggccacaagtttttaaatctaacatcatgatcttgtcacatgctatcttggcattcgcgttgatcttccaaacaagaaagttagctttggcaaattatgcttctggcccatcaagacaatttttcgagtttatttggttgttgtactacgctgaatattttgtttacgtttttatttga

SEQ ID NO: 368 - protein, 316 aa, synthetic construct
IEGSGHHESWNSIATKILNFGHTCWKLQRPYVVKGMISIAAGLFGRELLNNRHLFSWGLMAKAGFALVPILSFNFFAACMNQIYDVDIDRINKPDLPLVSGEMSIETAWILSIIVALTGLIVTIWLKSAPLFVFIYIFGIFAGFAYSVPPIRWKQYPGTNFLITISSHVGLAFTTYTATRSALGLPFVWSPAFLFIIAFMTVMGMTIAFAKDISDIEGDAKYGVSTVATKLGARCMTWVVSGVLLLNYLVSISIGIIWPQVFKSNIMILSHAILAFALIFQTRKLALANYASGPSRQFFEFIWLLYYAEYFVYVFI

SEQ ID NO: 369 - DNA, 951 bp, synthetic construct
  source 1..951: mol_type = other DNA
attgaaggttcagtgcatcatgaatctctgaactcaatcgcaactaaaattttgaactttggtcatacatgttggaaattgcaaagaccatacgttgttaagggtatgatttctattgctgcgggtttatttggtagagaattgctgaataacagacatttgttttcttggggtttgatggtgaaagcaatgttcgcattagttccaatcttgtcttttaatttctttgctgcatgcatgaaccaaatatatgatgttgatattgatagaattaataagccagatttgccattggtttctggtgaaatgtcaatcgaaactgcttggattttatctatcatcgttgcattgactggtttgatcgttacaattgtcttaaaatcagctccattgttcgtttttatatatatcttcggtatcttcgctggttttgcatactctgttccaccaattagatggaagcaataccctgggactaatttcttgatcacaatttcttcacatgttggtttggcttttactgtgtacacggctactcgctctgcattaggtttgccatttgtttgggcgccagcttttgcgtttattatcgcttttatgactgttatgggtatgacaatcgctttcgcaaaggatatctctgatattgaaggtgacgctaaatacggtgtttcaactgttgctacaaaattgggtgcaagatgcatgacttgggttgtttctggtgttttgttgttgaactatttggtttctatctcaatcggtattatttggccacaagtttttaaatctaacatcatgatcttgtcacatgctatcttggcattcatgttgatcttccaaacaagaaagttagctttggcaaattatgcttctgtcccatcaagacaatttttcgagtttatttggttgttgtactacgctgaatattttgtttacgtttttatttga

SEQ ID NO: 370 - protein, 316 aa, synthetic construct
IEGSVHHESLNSIATKILNFGHTCWKLQRPYVVKGMISIAAGLFGRELLNNRHLFSWGLMVKAMFALVPILSFNFFAACMNQIYDVDIDRINKPDLPLVSGEMSIETAWILSIIVALTGLIVTIVLKSAPLFVFIYIFGIFAGFAYSVPPIRWKQYPGTNFLITISSHVGLAFTVYTATRSALGLPFVWAPAFAFIIAFMTVMGMTIAFAKDISDIEGDAKYGVSTVATKLGARCMTWVVSGVLLLNYLVSISIGIIWPQVFKSNIMILSHAILAFMLIFQTRKLALANYASVPSRQFFEFIWLLYYAEYFVYVFI

SEQ ID NO: 371 - DNA, 951 bp, synthetic construct
  source 1..951: mol_type = other DNA
attgaaggttcagggcatcatgaatctctggactcaatcgcaactaaaattttgaactttggtcatacatgttggaaattgcaaagaccatacgttgttaagggtatgatttctattgctggcggtttatttggtagagaattgctgaataacagacatttgttttcttggggtttgatggtgaaagcatggttcgcattagttccaatcttgtcttttaatttctttgctgcatgcatgaaccaaatatatgatgttgatattgatagaattaataagccagatttgccattggtttctggtgaaatgtcaatcgaaactgcttggattttatctatcatcgttgcattgactggtttgatcgttacaattatgttaaaatcagctccattgttcgtttttatatatatcttcggtatcttcgctggttttgcatactctgttccaccaattagatggaagcaataccctgggactaatttcttgatcacaatttcttcacatgttggtttggcttttactgcgtacacggctactgtctctgcattaggtttgccatttgtttgggcgccagcttttgcgtttattatcgcttttatgactgttatgggtatgacaatcgctttcgcaaaggatatctctgatattgaaggtgacgctaaatacggtgtttcaactgttgctacaaaattgggtgcaagatgcatgactttggttgtttctggtgttttgttgttgaactatttggtttctatctcaatcggtattatttggccacaagtttttaaatctaacatcatgatcttgtcacatgctatcttggcattcatgttgatcttccaaacaagaaagttagctttggcaaattatgcttctggcccatcaagacaatttttcgagtttatttggttgttgtactacgctgaatattttgtttacgtttttatttga

SEQ ID NO: 372 - protein, 316 aa, synthetic construct
IEGSGHHESLDSIATKILNFGHTCWKLQRPYVVKGMISIAGGLFGRELLNNRHLFSWGLMVKAWFALVPILSFNFFAACMNQIYDVDIDRINKPDLPLVSGEMSIETAWILSIIVALTGLIVTIMLKSAPLFVFIYIFGIFAGFAYSVPPIRWKQYPGTNFLITISSHVGLAFTAYTATVSALGLPFVWAPAFAFIIAFMTVMGMTIAFAKDISDIEGDAKYGVSTVATKLGARCMTLVVSGVLLLNYLVSISIGIIWPQVFKSNIMILSHAILAFMLIFQTRKLALANYASGPSRQFFEFIWLLYYAEYFVYVFI

SEQ ID NO: 373 - DNA, 951 bp, synthetic construct
  source 1..951: mol_type = other DNA
attgaaggttcagggcatcatgaatctgtgaactcaatcgcaactaaaattttgaactttggtcatacatgttggaaattgcaaagaccatacgttgttaagggtatgatttctattgctgcgggtttatttggtagagaattgcgcaataacagacatttgttttcttggggtttgatggcgaaagcaatgttcgcattagttccaatcttgtcttttaatttctttgctgcatgcatgaaccaaatatatgatgttgatattgatagaattaataagccagatttgccattggtttctggtgaaatgtcaatcgaaactgcttggattttatctatcatcgttgcattgactggtttgatcgttacaatttggttaaaatcagctccattgttcgtttttatatatatcttcggtatcttcgctggttttgcatactctgttccaccaattagatggaagcaataccctgggactaatttcttgatcacaatttcttcacatgttggtttggcttttactgcgtacgcagctactcgctctgcattaggtttgccatttgtttggaggccagctttttcttttattatcgcttttatgactgttatgggtatgacaatcgctttcgcaaaggatatctctgatattgaaggtgacgctaaatacggtgtttcaactgttgctacaaaattgggtgcaagaaacatgactttcgttgtttctggtgttttgttgttgaactatttggtttctatctcaatcggtattatttggccacaagtttttaaatctaacatcatgatcttgtcacatgctatcttggcattctgtttgatcttccaaacaagagaattagctttggcaaattatgcttctgcaccatcaagacaatttttcgagtttatttggttgttgtactacgctgaatattttgtttacgtttttatttga

SEQ ID NO: 374 - protein, 316 aa, synthetic construct
IEGSGHHESVNSIATKILNFGHTCWKLQRPYVVKGMISIAAGLFGRELRNNRHLFSWGLMAKAMFALVPILSFNFFAACMNQIYDVDIDRINKPDLPLVSGEMSIETAWILSIIVALTGLIVTIWLKSAPLFVFIYIFGIFAGFAYSVPPIRWKQYPGTNFLITISSHVGLAFTAYAATRSALGLPFVWRPAFSFIIAFMTVMGMTIAFAKDISDIEGDAKYGVSTVATKLGARNMTFVVSGVLLLNYLVSISIGIIWPQVFKSNIMILSHAILAFCLIFQTRELALANYASAPSRQFFEFIWLLYYAEYFVYVFI

SEQ ID NO: 375 - DNA, 951 bp, synthetic construct
  source 1..951: mol_type = other DNA
attgaaggttcagtgcatcatgaatctgtgaactcaatcgcaactaaaattttgaactttggtcatacatgttggaaattgcaaagaccatacgttgttaagggtatgatttctattgcttcgggtttatttggtagagaattgatgaataacagacatttgttttcttggggtttgatggcgaaagcaatgttcgcattagttccaatcttgtcttttaatttctttgctgcagcaatgaaccaaatatatgatgttgatattgatagaattaataagccagatttgccattggtttctggtgaaatgtcaatcgaaactgcttggattttatctatcatcgttgcattgactggtttgatcgttacaatttggttaaaatcagctccattgttcgtttttatatatatcttcggtatcttcgctggttttgcatactctgttccaccaattagatggaagcaataccctgggactaatttcttgatcacaatttcttcacatgttggtttggcttttactgcgtacggcgctactcgctctgcattaggtttgccatttgtttggtcgccagcttttgtctttattatcgcttttatgactgttatgggtatgacaatcgctttcgcaaaggatatctctgatattgaaggtgacgctaaatacggtgtttcaactgttgctacaaaattgggtgcaagaaagatgactttggttgtttctggtgttttgttgttgaactatttggtttctatctcaatcggtattatttggccacaagtttttaaatctaacatcatgatcttgtcacatgctatcttggcattcatgttgatcttccaaacaagacgcttagctttggcaaattatgcttctggcccatcaagacaatttttcgagtttatttggttgttgtactacgctgaatattttgtttacgtttttatttga

SEQ ID NO: 376 - protein, 316 aa, synthetic construct
IEGSVHHESVNSIATKILNFGHTCWKLQRPYVVKGMISIASGLFGRELMNNRHLFSWGLMAKAMFALVPILSFNFFAAAMNQIYDVDIDRINKPDLPLVSGEMSIETAWILSIIVALTGLIVTIWLKSAPLFVFIYIFGIFAGFAYSVPPIRWKQYPGTNFLITISSHVGLAFTAYGATRSALGLPFVWSPAFVFIIAFMTVMGMTIAFAKDISDIEGDAKYGVSTVATKLGARKMTLVVSGVLLLNYLVSISIGIIWPQVFKSNIMILSHAILAFMLIFQTRRLALANYASGPSRQFFEFIWLLYYAEYFVYVFI

SEQ ID NO: 377 - DNA, 951 bp, synthetic construct
  source 1..951: mol_type = other DNA
attgaaggttcagtgcatcatgaatctgtgaactcaatcgcaactaaaattttgaactttggtcatacatgttggaaattgcaaagaccatacgttgttaagggtatgatttctattgctgcgggtttatttggtagagaattgcgcaataacagacatttgttttcttggggtttgatggcgaaagcactgttcgcattagttccaatcttgtcttttaatttctttgctgcagcaatgaaccaaatatatgatgttgatattgatagaattaataagccagatttgccattggtttctggtgaaatgtcaatcgaaactgcttggattttatctatcatcgttgcattgactggtttgatcgttacaattatgttaaaatcagctccattgttcgtttttatatatatcttcggtatcttcgctggttttgcatactctgttccaccaattagatggaagcaataccctgggactaatttcttgatcacaatttcttcacatgttggtttggcttttactacgtacggcgctactgtctctgcattaggtttgccatttgtttggcagccagcttttgcgtttattatcgcttttatgactgttatgggtatgacaatcgctttcgcaaaggatatctctgatattgaaggtgacgctaaatacggtgtttcaactgttgctacaaaattgggtgcaagatgcatgactttggttgtttctggtgttttgttgttgaactatttggtttctatctcaatcggtattatttggccacaagtttttaaatctaacatcatgatcttgtcacatgctatcttggcattcatgttgatcttccaaacaagaaagttagctttggcaaattatgcttctgtcccatcaagacaatttttcgagtttatttggttgttgtactacgctgaatattttgtttacgtttttatttga

SEQ ID NO: 378 - protein, 316 aa, synthetic construct
IEGSVHHESVNSIATKILNFGHTCWKLQRPYVVKGMISIAAGLFGRELRNNRHLFSWGLMAKALFALVPILSFNFFAAAMNQIYDVDIDRINKPDLPLVSGEMSIETAWILSIIVALTGLIVTIMLKSAPLFVFIYIFGIFAGFAYSVPPIRWKQYPGTNFLITISSHVGLAFTTYGATVSALGLPFVWQPAFAFIIAFMTVMGMTIAFAKDISDIEGDAKYGVSTVATKLGARCMTLVVSGVLLLNYLVSISIGIIWPQVFKSNIMILSHAILAFMLIFQTRKLALANYASVPSRQFFEFIWLLYYAEYFVYVFI

SEQ ID NO: 379 - DNA, 951 bp, synthetic construct
  source 1..951: mol_type = other DNA
attgaaggttcagggcatcatgaatctgtgaactcaatcgcaactaaaattttgaactttggtcatacatgttggaaattgcaaagaccatacgttgttaagggtatgatttctattgctgcgggtttatttggtagagaattgctgaataacagacatttgttttcttggggtttgatggtgaaagcagggttcgcattagttccaatcttgtcttttaatttctttgctgcagcaatgaaccaaatatatgatgttgatattgatagaattaataagccagatttgccattggtttctggtgaaatgtcaatcgaaactgcttggattttatctatcatcgttgcattgactggtttgatcgttacaattgtcttaaaatcaactccattgttcgtttttatatatatcttcggtatcttcgctggttttgcatactctgttccaccaattagatggaagcaataccctgggactaatttcttgatcacaatttcttcacatgttggtttggcttttactgtgtacgcagctactcgctctgcattaggtttgccatttgtttggcagccagcttttctgtttattatcgcttttatgactgttatgggtatgacaatcgctttcgcaaaggatatctctgatattgaaggtgacgctaaatacggtgtttcaactgttgctacaaaattgggtgcaagagtcatgactttggttgtttctggtgttttgttgttgaactatttggtttctatctcaatcggtattatttggccacaagtttttaaatctaacatcatgatcttgtcacatgctatcttggcattcatgttgatcttccaaacaagagacttagctttggcaaattatgcttctggcccatcaagacaatttttcgagtttatttggttgttgtactacgctgaatattttgtttacgtttttatttga

SEQ ID NO: 380 - protein, 316 aa, synthetic construct
IEGSGHHESVNSIATKILNFGHTCWKLQRPYVVKGMISIAAGLFGRELLNNRHLFSWGLMVKAGFALVPILSFNFFAAAMNQIYDVDIDRINKPDLPLVSGEMSIETAWILSIIVALTGLIVTIVLKSTPLFVFIYIFGIFAGFAYSVPPIRWKQYPGTNFLITISSHVGLAFTVYAATRSALGLPFVWQPAFLFIIAFMTVMGMTIAFAKDISDIEGDAKYGVSTVATKLGARVMTLVVSGVLLLNYLVSISIGIIWPQVFKSNIMILSHAILAFMLIFQTRDLALANYASGPSRQFFEFIWLLYYAEYFVYVFI

SEQ ID NO: 381 - DNA, 951 bp, synthetic construct
  source 1..951: mol_type = other DNA
attgaaggttcagggcatcatgaatctgtggactcaatcgcaactaaaattttgaactttggtcatacatgttggaaattgcaaagaccatacgttgttaagggtatgatttctattgctgcgggtttatttggtagagaattgctgaataacagacatttgttttcttggggtttgatggtgaaagcactgttcgcattagttccaatcttgtcttttaatttctttgctgcagcaatgaaccaaatatatgatgttgatattgatagaattaataagccagatttgccattggtttctggtgaaatgtcaatcgaaactgcttggattttatctatcatcgttgcattgactggtttgatcgttacaattgtcttaaaatcagctccattgttcgtttttatatatatcttcggtatcttcgctggttttgcatactctgttccaccaattagatggaagcaataccctgggactaatttcttgatcacaatttcttcacatgttggtttggcttttactgcgtacacggctactctgtctgcattaggtttgccatttgtttgggcgccagcttttgcgtttattatcgcttttatgactgttatgggtatgacaatcgctttcgcaaaggatatctctgatattgaaggtgacgctaaatacggtgtttcaactgttgctacaaaattgggtgcaagatgcatgactttggttgtttctggtgttttgttgttgaactatttggtttctatctcaatcggtattatttggccacaagtttttaaatctaacatcatgatcttgtcacatgctatcttggcattcatgttgatcttccaaacaagagacttagctttggcaaattatgcttctggcccatcaagacaatttttcgagtttatttggttgttgtactacgctgaatattttgtttacgtttttatttga

SEQ ID NO: 382 - protein, 316 aa, synthetic construct
IEGSGHHESVDSIATKILNFGHTCWKLQRPYVVKGMISIAAGLFGRELLNNRHLFSWGLMVKALFALVPILSFNFFAAAMNQIYDVDIDRINKPDLPLVSGEMSIETAWILSIIVALTGLIVTIVLKSAPLFVFIYIFGIFAGFAYSVPPIRWKQYPGTNFLITISSHVGLAFTAYTATLSALGLPFVWAPAFAFIIAFMTVMGMTIAFAKDISDIEGDAKYGVSTVATKLGARCMTLVVSGVLLLNYLVSISIGIIWPQVFKSNIMILSHAILAFMLIFQTRDLALANYASGPSRQFFEFIWLLYYAEYFVYVFI

SEQ ID NO: 383 - DNA, 951 bp, synthetic construct
  source 1..951: mol_type = other DNA
attgaaggttcagtgcatcatgaatctgtgaactcaatcgcaactaaaattttgaactttggtcatacatgttggaaattgcaaagaccatacgttgttaagggtatgatttctattgctgcgggtttatttggtagagaattgctgaataacagacatttgttttcttggggtttgatggtgaaagcaacgttcgcattagttccaatcttgtcttttaatttctttgctgcatgcatgaaccaaatatatgatgttgatattgatagaattaataagccagatttgccattggtttctggtgaaatgtcaatcgaaactgcttggattttatctatcatcgttgcattgactggtttgatcgttacaattatgttaaaatcagctccattgttcgtttttatatatatcttcggtatcttcgctggttttgcatactctgttccaccaattagatggaagcaataccctgggactaatttcttgatcacaatttcttcacatgttggtttggcttttactgcgtacgcagctactctgtctgcattaggtttgccatttgtttggcagccagcttttgcgtttattatcgcttttatgactgttatgggtatgacaatcgctttcgcaaaggatatctctgatattgaaggtgacgctaaatacggtgtttcaactgttgctacaaaattgggtgcaagagtcatgacttgggttgtttctggtgttttgttgttgaactatttggtttctatctcaatcggtattatttggccacaagtttttaaatctaacatcatgatcttgtcacatgctatcttggcattcatgttgatcttccaaacaagaaagttagctttggcaaattatgcttctggcccatcaagacaatttttcgagtttatttggttgttgtactacgctgaatattttgtttacgtttttatttga

SEQ ID NO: 384 - protein, 316 aa, synthetic construct
IEGSVHHESVNSIATKILNFGHTCWKLQRPYVVKGMISIAAGLFGRELLNNRHLFSWGLMVKATFALVPILSFNFFAACMNQIYDVDIDRINKPDLPLVSGEMSIETAWILSIIVALTGLIVTIMLKSAPLFVFIYIFGIFAGFAYSVPPIRWKQYPGTNFLITISSHVGLAFTAYAATLSALGLPFVWQPAFAFIIAFMTVMGMTIAFAKDISDIEGDAKYGVSTVATKLGARVMTWVVSGVLLLNYLVSISIGIIWPQVFKSNIMILSHAILAFMLIFQTRKLALANYASGPSRQFFEFIWLLYYAEYFVYVFI

SEQ ID NO: 385 - DNA, 951 bp, synthetic construct
  source 1..951: mol_type = other DNA
attgaaggttcagtgcatcatgaatcttggaactcaatcgcaactaaaattttgaactttggtcatacatgttggaaattgcaaagaccatacgttgttaagggtatgatttctattgcttcgggtttatttggtagagaattgatgaataacagacatttgttttcttggggtttgatggcgaaagcactgttcgcattagttccaatcttgtcttttaatttctttgctgcagcaatgaaccaaatatatgatgttgatattgatagaattaataagccagatttgccattggtttctggtgaaatgtcaatcgaaactgcttggattttatctatcatcgttgcattgactggtttgatcgttacaatttggttaaaatcagctccattgttcgtttttatatatatcttcggtatcttcgctggttttgcatactctgttccaccaattagatggaagcaataccctgggactaatttcttgatcacaatttcttcacatgttggtttggcttttactgcgtacacggctactgtctctgcattaggtttgccatttgtttggtcgccagcttttgcgtttattatcgcttttatgactgttatgggtatgacaatcgctttcgcaaaggatatctctgatattgaaggtgacgctaaatacggtgtttcaactgttgctacaaaattgggtgcaagaaagatgactttggttgtttctggtgttttgttgttgaactatttggtttctatctcaatcggtattatttggccacaagtttttaaatctaacatcatgatcttgtcacatgctatcttggcattcgcgttgatcttccaaacaagagacttagctttggcaaattatgcttctaagccatcaagacaatttttcgagtttatttggttgttgtactacgctgaatattttgtttacgtttttatttga

SEQ ID NO: 386 - protein, 316 aa, synthetic construct
IEGSVHHESWNSIATKILNFGHTCWKLQRPYVVKGMISIASGLFGRELMNNRHLFSWGLMAKALFALVPILSFNFFAAAMNQIYDVDIDRINKPDLPLVSGEMSIETAWILSIIVALTGLIVTIWLKSAPLFVFIYIFGIFAGFAYSVPPIRWKQYPGTNFLITISSHVGLAFTAYTATVSALGLPFVWSPAFAFIIAFMTVMGMTIAFAKDISDIEGDAKYGVSTVATKLGARKMTLVVSGVLLLNYLVSISIGIIWPQVFKSNIMILSHAILAFALIFQTRDLALANYASKPSRQFFEFIWLLYYAEYFVYVFI

SEQ ID NO: 387 - DNA, 951 bp, synthetic construct
  source 1..951: mol_type = other DNA
attgaaggttcagtgcatcatgaatctctgaactcaatcgcaactaaaattttgaactttggtcatacatgttggaaattgcaaagaccatacgttgtaaagggtatgatttctattgctgcgggtttatttggtagagaattgctgaataacagacatttgttttcttggggtttgatggcgaaagcaatgttcgcattagttccaatcttgtcttttaatttctttgctgcatgcatgaaccaaatatatgatgttgatattgatagaattaataagccagatttgccattggtttctggtgaaatgtcaatcgaaactgcttggattttatctatcatcgttgcattgactggtttgatcgttacaattatgttaaaatcagctccattgttcgtttttatatatatcttcggtatcttcgctggttttgcatactctgttccaccaattagatggaagcaataccctgggactaatttcttgatcacaatttcttcacatgttggtttggcttttactgcgtacgcagctactctgtctgcattaggtttgccatttgtttggtcgccagcttttctgtttattatcgcttttatgactgttatgggtatgacaatcgctttcgcaaaggatatctctgatattgaaggtgacgctaaatacggtgtttcaactgttgctacaaaattgggtgcaagatgcatgactttggttgtttctggtgttttgttgttgaactatttggtttctatctcaatcggtattatttggccacaagtttttaaatctaacatcatgatcttgtcacatgctatcttggcattcgcgttgatcttccaaacaagacgcttagctttggcaaattatgcttctggcccatcaagacaatttttcgagtttatttggttgttgtactacgctgaatattttgtttacgtttttatttga

SEQ ID NO: 388 - protein, 316 aa, synthetic construct
IEGSVHHESLNSIATKILNFGHTCWKLQRPYVVKGMISIAAGLFGRELLNNRHLFSWGLMAKAMFALVPILSFNFFAACMNQIYDVDIDRINKPDLPLVSGEMSIETAWILSIIVALTGLIVTIMLKSAPLFVFIYIFGIFAGFAYSVPPIRWKQYPGTNFLITISSHVGLAFTAYAATLSALGLPFVWSPAFLFIIAFMTVMGMTIAFAKDISDIEGDAKYGVSTVATKLGARCMTLVVSGVLLLNYLVSISIGIIWPQVFKSNIMILSHAILAFALIFQTRRLALANYASGPSRQFFEFIWLLYYAEYFVYVFI

SEQ ID NO: 389 - DNA, 951 bp, synthetic construct
  source 1..951: mol_type = other DNA
attgaaggttcagggcatcatgaatctgtgaactcaatcgcaactaaaattttgaactttggtcatacatgttggaaattgcaaagaccatacgttgttaagggtatgatttctattgcttcgggtttatttggtagagaattgctgaataacagacatttgttttcttggggtttgatggtgaaagcactgttcgcattagttccaatcttgtcttttaatttctttgctgcagcaatgaaccaaatatatgatgttgatattgatagaattaataagccagatttgccattggtttctggtgaaatgtcaatcgaaactgcttggattttatctatcatcgttgcattgactggtttgatcgttacaatttggttaaaatcagctccattgttcgtttttatatatatcttcggtatcttcgctggttttgcatactctgttccaccaattagatggaagcaataccctgggactaatttcttgatcacaatttcttcacatgttggtttggcttttactgcgtacggcgctactcgctctgcattaggtttgccatttgtttggtcgccagcttttgcgtttattatcgcttttatgactgttatgggtatgacaatcgctttcgcaaaggatatctctgatattgaaggtgacgctaaatacggtgtttcaactgttgctacaaaattgggtgcaagatgcatgactttggttgtttctggtgttttgttgttgaactatttggtttctatctcaatcggtattatttggccacaagtttttaaatctaacatcatgatcttgtcacatgctatcttggcattcatgttgatcttccaaacaagacgcttagctttggcaaattatgcttctggcccatcaagacaatttttcgagtttatttggttgttgtactacgctgaatattttgtttacgtttttatttga

SEQ ID NO: 390 - protein, 316 aa, synthetic construct
IEGSGHHESVNSIATKILNFGHTCWKLQRPYVVKGMISIASGLFGRELLNNRHLFSWGLMVKALFALVPILSFNFFAAAMNQIYDVDIDRINKPDLPLVSGEMSIETAWILSIIVALTGLIVTIWLKSAPLFVFIYIFGIFAGFAYSVPPIRWKQYPGTNFLITISSHVGLAFTAYGATRSALGLPFVWSPAFAFIIAFMTVMGMTIAFAKDISDIEGDAKYGVSTVATKLGARCMTLVVSGVLLLNYLVSISIGIIWPQVFKSNIMILSHAILAFMLIFQTRRLALANYASGPSRQFFEFIWLLYYAEYFVYVFI

SEQ ID NO: 391 - DNA, 951 bp, synthetic construct
  source 1..951: mol_type = other DNA
attgaaggttcagtgcatcatgaatctgtgaactcaatcgcaactaaaattttgaactttggtcatacatgttggaaattgcaaagaccatacgttgttaagggtatgatttctattgctgcgggtttatttggtagagaattgctgaataacagacatttgttttcttggggtttgatggtgaaagcaatgttcgcattagttccaatcttgtcttttaatttctttgctgcagcaatgaaccaaatatatgatgttgatattgatagaattaataagccagatttgccattggtttctggtgaaatgtcaatcgaaactgcttggattttatctatcatcgttgcattgactggtttgatcgttacaatttggttaaaatcagctccattgttcgtttttatatatatcttcggtatcttcgctggttttgcatactctgttccaccaattagatggaagcaataccctgggactaatttcttgatcacaatttcttcacatgttggtttggcttttactgcgtacggcgctactgtctctgcattaggtttgccatttgtttggggcccagcttttgcgtttattatcgcttttatgactgttatgggtatgacaatcgctttcgcaaaggatatctctgatattgaaggtgacgctaaatacggtgtttcaactgttgctacaaaattgggtgcaagatgcatgacttgggttgtttctggtgttttgttgttgaactatttggtttctatctcaatcggtattatttggccacaagtttttaaatctaacatcatgatcttgtcacatgctatcttggcattcgcgttgatcttccaaacaagacgcttagctttggcaaattatgcttctgtcccatcaagacaatttttcgagtttatttggttgttgtactacgctgaatattttgtttacgtttttatttga

SEQ ID NO: 392 - protein, 316 aa, synthetic construct
IEGSVHHESVNSIATKILNFGHTCWKLQRPYVVKGMISIAAGLFGRELLNNRHLFSWGLMVKAMFALVPILSFNFFAAAMNQIYDVDIDRINKPDLPLVSGEMSIETAWILSIIVALTGLIVTIWLKSAPLFVFIYIFGIFAGFAYSVPPIRWKQYPGTNFLITISSHVGLAFTAYGATVSALGLPFVWGPAFAFIIAFMTVMGMTIAFAKDISDIEGDAKYGVSTVATKLGARCMTWVVSGVLLLNYLVSISIGIIWPQVFKSNIMILSHAILAFALIFQTRRLALANYASVPSRQFFEFIWLLYYAEYFVYVFI

SEQ ID NO: 393 - DNA, 951 bp, synthetic construct
  source 1..951: mol_type = other DNA
attgaaggttcagtgcatcatgaatctgtgaactcaatcgcaactaaaattttgaactttggtcatacatgttggaaattgcaaagaccatacgttgttaagggtatgatttctattgcttcgggtttatttggtagagaattgatgaataacagacatttgttttcttggggtttgatggtgaaagcagggttcgcattagttccaatcttgtcttttaatttctttgctgcatgcatgaaccaaatatatgatgttgatattgatagaattaataagccagatttgccattggtttctggtgaaatgtcaatcgaaactgcttggattttatctatcatcgttgcattgactggtttgatcgttacaatttggttaaaatcagctccattgttcgtttttatatatatcttcggtatcttcgctggttttgcatactctgttccaccaattagatggaagcaataccctgcgactaatttcttgatcacaatttcttcacatgttggtttggcttttactacgtacggcgctactgtctctgcattaggtttgccatttgtttggtcgccagcttttgcgtttattatcgcttttatgactgttatgggtatgacaatcgctttcgcaaaggatatctctgatattgaaggtgacgctaaatacggtgtttcaactgttgctacaaaattgggtgcaagaaagatgacttgggttgtttctggtgttttgttgttgaactatttggtttctatctcaatcggtattatttggccacaagtttttaaatctaacatcatgatcttgtcacatgctatcttggcattcgcgttgatcttccaaacaagagacttagctttggcaaattatgcttctggcccatcaagacaatttttcgagtttatttggttgttgtactacgctgaatattttgtttacgtttttatttga

SEQ ID NO: 394 - protein, 316 aa, synthetic construct
IEGSVHHESVNSIATKILNFGHTCWKLQRPYVVKGMISIASGLFGRELMNNRHLFSWGLMVKAGFALVPILSFNFFAACMNQIYDVDIDRINKPDLPLVSGEMSIETAWILSIIVALTGLIVTIWLKSAPLFVFIYIFGIFAGFAYSVPPIRWKQYPATNFLITISSHVGLAFTTYGATVSALGLPFVWSPAFAFIIAFMTVMGMTIAFAKDISDIEGDAKYGVSTVATKLGARKMTWVVSGVLLLNYLVSISIGIIWPQVFKSNIMILSHAILAFALIFQTRDLALANYASGPSRQFFEFIWLLYYAEYFVYVFI

SEQ ID NO: 395 - DNA, 951 bp, synthetic construct
  source 1..951: mol_type = other DNA
attgaaggttcagtgcatcatgaatcttggaactcaatcgcaactaaaattttgaactttggtcatacatgttggaaattgcaaagaccatacgttgttaagggtatgatttctattgcttcgggtttatttggtagagaattgctgaataacagacatttgttttcttggggtttgatggcgaaagcactgttcgcattagttccaatcttgtcttttaatttctttgctgcatgcatgaaccaaatatatgatgttgatattgatagaattaataagccagatttgccattggtttctggtgaaatgtcaatcgaaactgcttggattttatctatcatcgttgcattgactggtttgatcgttacaattatgttaaaatcagctccattgttcgtttttatatatataatcggtatcttcgctggttttgcatactctgttccaccaattagatggaagcaataccctgggactaatttcttgatcacaatttcttcacatgttggtttggcttttactgcgtacgcagctactctgtctgcattaggtttgccatttgtttggtcgccagcttttgtctttattatcgcttttatgactgttatgggtatgacaatcgctttcgcaaaggatatctctgatattgaaggtgacgctaaatacggtgtttcaactgttgctacaaaattgggtgcaagaaagatgacttgggttgtttctggtgttttgttgttgaactatttggtttctatctcaatcggtattatttggccacaagtttttaaatctaacatcatgatcttgtcacatgctatcttggcattcatgttgatcttccaaacaagacgcttagctttggcaaattatgcttctggcccatcaagacaatttttcgagtttatttggttgttgtactacgctgaatattttgtttacgtttttatttga

SEQ ID NO: 396 - protein, 316 aa, synthetic construct
IEGSVHHESWNSIATKILNFGHTCWKLQRPYVVKGMISIASGLFGRELLNNRHLFSWGLMAKALFALVPILSFNFFAACMNQIYDVDIDRINKPDLPLVSGEMSIETAWILSIIVALTGLIVTIMLKSAPLFVFIYIIGIFAGFAYSVPPIRWKQYPGTNFLITISSHVGLAFTAYAATLSALGLPFVWSPAFVFIIAFMTVMGMTIAFAKDISDIEGDAKYGVSTVATKLGARKMTWVVSGVLLLNYLVSISIGIIWPQVFKSNIMILSHAILAFMLIFQTRRLALANYASGPSRQFFEFIWLLYYAEYFVYVFI

SEQ ID NO: 397 - DNA, 951 bp, synthetic construct
  source 1..951: mol_type = other DNA
attgaaggttcaccacatcatgaatctgataactcaatcgcaactaaaattttgaactttggtcatacatgttggaaattgcaaagaccatacgttgttaagggtatgatttctattgcttcgggtttatttggtagagaattgcgcaataacagacatttgttttcttggggtttgatggcgaaagcactgttcgcattagttccaatcttgtcttttaatttctttgctgcatgcatgaaccaaatatatgatgttgatattgatagaattaataagccagatttgccattggtttctggtgaaatgtcaatcgaaactgcttggattttatctatcatcgttgcattgactggtttgatcgttacaattgtcttaaaatcagctccattgttcgtttttatatatatcttcggtatcttcgctggttttgcatactctgttccaccaattagatggaagcaataccctgcgactaatttcttgatcacaatttcttcacatgttggtttggcttttactgtgtacgcagctactcgctctgcattaggtttgccatttgtttggtcgccagcttttctgtttattatcgcttttatgactgttatgggtatgacaatcgctttcgcaaaggatatctctgatattgaaggtgacgctaaatacggtgtttcaactgttgctacaaaattgggtgcaagatgcatgacttgggttgtttctggtgttttgttgttgaactatttggtttctatctcaatcggtattatttggccacaagtttttaaatctaacatcatgatcttgtcacatgctatcttggcattcgcgttgatcttccaaacaagagacttagctttggcaaattatgcttctggcccatcaagacaatttttcgagtttatttggttgttgtactacgctgaatattttgtttacgtttttatttga

SEQ ID NO: 398 - protein, 316 aa, synthetic construct
IEGSPHHESDNSIATKILNFGHTCWKLQRPYVVKGMISIASGLFGRELRNNRHLFSWGLMAKALFALVPILSFNFFAACMNQIYDVDIDRINKPDLPLVSGEMSIETAWILSIIVALTGLIVTIVLKSAPLFVFIYIFGIFAGFAYSVPPIRWKQYPATNFLITISSHVGLAFTVYAATRSALGLPFVWSPAFLFIIAFMTVMGMTIAFAKDISDIEGDAKYGVSTVATKLGARCMTWVVSGVLLLNYLVSISIGIIWPQVFKSNIMILSHAILAFALIFQTRDLALANYASGPSRQFFEFIWLLYYAEYFVYVFI

SEQ ID NO: 399 - DNA, 951 bp, synthetic construct
  source 1..951: mol_type = other DNA
attgaaggttcagggcatcatgaatctgtgaactcaatcgcaactaaaattttgaactttggtcatacatgttggaaattgcaaagaccatacgttgttaagggtatgatttctattgctgcgggtttatttggtagagaattgatgaataacagacatttgttttcttggggtttgatggcgaaagcagggttcgcattagttccaatcttgtcttttaatttctttgctgcagcaatgaaccaaatatatgatgttgatattgatagaattaataagccagatttgccattggtttctggtgaaatgtcaatcgaaactgcttggattttatctatcatcgttgcattgactggtttgatcgttacaatttggttaaaatcagctccattgttcgtttttatatatatcttcggtatcttcgctggttttgcatactctgttccaccaattagatggaagcaataccctgggactaatttcttgatcacaatttcttcacatgttggtttggcttttactgggtacacggctactcgctctgcattaggtttgccatttgtttggtcgccagcttttgtctttattatcgcttttatgactgttatgggtatgacaatcgctttcgcaaaggatatctctgatattgaaggtgacgctaaatacggtgtttcaactgttgctacaaaattgggtgcaagaaagatgactttggttgtttctggtgttttgttgttgaactatttggtttctatctcaatcggtattatttggccacaagtttttaaatctaacatcatgatcttgtcacatgctatcttggcattcgcgttgatcttccaaacaagacgcttagctttggcaaattatgcttctggcccatcaagacaatttttcgagtttatttggttgttgtactacgctgaatattttgtttacgtttttatttga

SEQ ID NO: 400 - protein, 316 aa, synthetic construct
IEGSGHHESVNSIATKILNFGHTCWKLQRPYVVKGMISIAAGLFGRELMNNRHLFSWGLMAKAGFALVPILSFNFFAAAMNQIYDVDIDRINKPDLPLVSGEMSIETAWILSIIVALTGLIVTIWLKSAPLFVFIYIFGIFAGFAYSVPPIRWKQYPGTNFLITISSHVGLAFTGYTATRSALGLPFVWSPAFVFIIAFMTVMGMTIAFAKDISDIEGDAKYGVSTVATKLGARKMTLVVSGVLLLNYLVSISIGIIWPQVFKSNIMILSHAILAFALIFQTRRLALANYASGPSRQFFEFIWLLYYAEYFVYVFI

SEQ ID NO: 401 - DNA, 951 bp, synthetic construct
  source 1..951: mol_type = other DNA
attgaaggttcagggcatcatgaatctgtgaactcaatcgcaactaaaattttgaactttggtcatacatgttggaaattgcaaagaccatacgttgttaagggtatgatttctattgcttcgggtttatttggtagagaattgctgaataacagacatttgttttcttggggtttgatggcgaaagcagggttcgcattagttccaatcttgtcttttaatttctttgctgcagcaatgaaccaaatatatgatgttgatattgatagaattaataagccagatttgccattggtttctggtgaaatgtcaatcgaaactgcttggattttatctatcatcgttgcattgactggtttgatcgttacaatttggttaaaatcagctccattgttcgtttttatatatatcttcggtatcttcgctggttttgcatactctgttccaccaattagatggaagcaataccctgggactaatttcttgatcacaatttcttcacatgttggtttggcttttactgcgtacggcgctactctgtctgcattaggtttgccatttgtttggcagccagcttttgtctttattatcgcttttatgactgttatgggtatgacaatcgctttcgcaaaggatatctctgatattgaaggtgacgctaaatacggtgtttcaactgttgctacaaaattgggtgcaagatgcatgacttgggttgtttctggtgttttgttgttgaactatttggtttctatctcaatcggtattatttggccacaagtttttaaatctaacatcatgatcttgtcacatgctatcttggcattcatgttgatcttccaaacaagaaagttagctttggcaaattatgcttctggcccatcaagacaatttttcgagtttatttggttgttgtactacgctgaatattttgtttacgtttttatttga

SEQ ID NO: 402 - protein, 316 aa, synthetic construct
IEGSGHHESVNSIATKILNFGHTCWKLQRPYVVKGMISIASGLFGRELLNNRHLFSWGLMAKAGFALVPILSFNFFAAAMNQIYDVDIDRINKPDLPLVSGEMSIETAWILSIIVALTGLIVTIWLKSAPLFVFIYIFGIFAGFAYSVPPIRWKQYPGTNFLITISSHVGLAFTAYGATLSALGLPFVWQPAFVFIIAFMTVMGMTIAFAKDISDIEGDAKYGVSTVATKLGARCMTWVVSGVLLLNYLVSISIGIIWPQVFKSNIMILSHAILAFMLIFQTRKLALANYASGPSRQFFEFIWLLYYAEYFVYVFI

SEQ ID NO: 403 - DNA, 951 bp, synthetic construct
  source 1..951: mol_type = other DNA
attgaaggttcagggcatcatgaatctgtgaactcaatcgcaactaaaattttgaactttggtcatacatgttggaaattgcaaagaccatacgttgttaagggtatgatttctattgcttcgggtttatttggtagagaattgatgaataacagacatttgttttcttggggtttgatggcgaaagcaatgttcgcattagttccaatcttgtcttttaatttctttgctgcagcaatgaaccaaatatatgatgttgatattgatagaattaataagccagatttgccattggtttctggtgaaatgtcaatcgaaactgcttggattttatctatcatcgttgcattgactggtttgatcgttacaatttggttaaaatcagctccattgttcgtttttatatatatcttcggtatcttcgctggttttgcatactctgttccaccaattagatggaagcaataccctgcgactaatttcttgatcacaatttcttcacatgttggtttggcttttactgcgtacacggctactgtctctgcattaggtttgccatttgtttggtcgccagcttttctgtttattatcgcttttatgactgttatgggtatgacaatcgctttcgcaaaggatatctctgatattgaaggtgacgctaaatacggtgtttcaactgttgctacaaaattgggtgcaagatgcatgactttggttgtttctggtgttttgttgttgaactatttggtttctatctcaatcggtattatttggccacaagtttttaaatctaacatcatgatcttgtcacatgctatcttggcattcatgttgatcttccaaacaagagacttagctttggcaaattatgcttctaagccatcaagacaatttttcgagtttatttggttgttgtactacgctgaatattttgtttacgtttttatttga

SEQ ID NO: 404 - protein, 316 aa, synthetic construct
IEGSGHHESVNSIATKILNFGHTCWKLQRPYVVKGMISIASGLFGRELMNNRHLFSWGLMAKAMFALVPILSFNFFAAAMNQIYDVDIDRINKPDLPLVSGEMSIETAWILSIIVALTGLIVTIWLKSAPLFVFIYIFGIFAGFAYSVPPIRWKQYPATNFLITISSHVGLAFTAYTATVSALGLPFVWSPAFLFIIAFMTVMGMTIAFAKDISDIEGDAKYGVSTVATKLGARCMTLVVSGVLLLNYLVSISIGIIWPQVFKSNIMILSHAILAFMLIFQTRDLALANYASKPSRQFFEFIWLLYYAEYFVYVFI

SEQ ID NO: 405 - DNA, 951 bp, synthetic construct
  source 1..951: mol_type = other DNA
attgaaggttcagggcatcatgaatctgtgaactcaatcgcaactaaaattttgaactttggtcatacatgttggaaattgcaaagaccatacgttgttaagggtatgatttctattgctgcgggtttatttggtagagaattgatgaataacagacatttgttttcttggggtttgatggcgaaagcactgttcgcattagttccaatcttgtcttttaatttctttgctgcatgcatgaaccaaatatatgatgttgatattgatagaattaataagccagatttgccattggtttctggtgaaatgtcaatcgaaactgcttggattttatctatcatcgttgcattgactggtttgatcgttacaattatgttaaaatcaactccattgttcgtttttatatatatcttcggtatcttcgctggttttgcatactctgttccaccaattagatggaagcaataccctgggactaatttcttgatcacaatttcttcacatgttggtttggcttttactgggtacgcagctactcgctctgcattaggtttgccatttgtttgggcgccagcttttctgtttattatcgcttttatgactgttatgggtatgacaatcgctttcgcaaaggatatctctgatattgaaggtgacgctaaatacggtgtttcaactgttgctacaaaattgggtgcaagaaagatgactttggttgtttctggtgttttgttgttgaactatttggtttctatctcaatcggtattatttggccacaagtttttaaatctaacatcatgatcttgtcacatgctatcttggcattcgcgttgatcttccaaacaagagacttagctttggcaaattatgcttctggcccatcaagacaatttttcgagtttatttggttgttgtactacgctgaatattttgtttacgtttttatttga

SEQ ID NO: 406 - protein, 316 aa, synthetic construct
IEGSGHHESVNSIATKILNFGHTCWKLQRPYVVKGMISIAAGLFGRELMNNRHLFSWGLMAKALFALVPILSFNFFAACMNQIYDVDIDRINKPDLPLVSGEMSIETAWILSIIVALTGLIVTIMLKSTPLFVFIYIFGIFAGFAYSVPPIRWKQYPGTNFLITISSHVGLAFTGYAATRSALGLPFVWAPAFLFIIAFMTVMGMTIAFAKDISDIEGDAKYGVSTVATKLGARKMTLVVSGVLLLNYLVSISIGIIWPQVFKSNIMILSHAILAFALIFQTRDLALANYASGPSRQFFEFIWLLYYAEYFVYVFI

SEQ ID NO: 407 - DNA, 951 bp, synthetic construct
  source 1..951: mol_type = other DNA
attgaaggttcagggcatcatgaatctctgaactcaatcgcaactaaaattttgaactttggtcatacatgttggaaattgcaaagaccatacgttgttaagggtatgatttctattgcttcgggtttatttggtagagaattgatgaataacagacatttgttttcttggggtttgatggtgaaagcatggttcgcattagttccaatcttgtcttttaatttctttgctgcatgcatgaaccaaatatatgatgttgatattgatagaattaataagccagatttgccattggtttctggtgaaatgtcaatcgaaactgcttggattttatctatcatcgttgcattgactggtttgatcgttacaattgtcttaaaatcagctccattgttcgtttttatatatatcttcggtatcttcgctggttttgcatactctgttccaccaattagatggaagcaataccctgcgactaatttcttgatcacaatttcttcacatgttggtttggcttttactacgtacacggctactcgctctgcattaggtttgccatttgtttggtcgccagcttttgcgtttattatcgcttttatgactgttatgggtatgacaatcgctttcgcaaaggatatctctgatattgaaggtgacgctaaatacggtgtttcaactgttgctacaaaattgggtgcaagaaagatgactttggttgtttctggtgttttgttgttgaactatttggtttctatctcaatcggtattatttggccacaagtttttaaatctaacatcatgatcttgtcacatgctatcttggcattcgcgttgatcttccaaacaagacgcttagctttggcaaattatgcttctggcccatcaagacaatttttcgagtttatttggttgttgtactacgctgaatattttgtttacgtttttatttga

SEQ ID NO: 408 - protein, 316 aa, synthetic construct
IEGSGHHESLNSIATKILNFGHTCWKLQRPYVVKGMISIASGLFGRELMNNRHLFSWGLMVKAWFALVPILSFNFFAACMNQIYDVDIDRINKPDLPLVSGEMSIETAWILSIIVALTGLIVTIVLKSAPLFVFIYIFGIFAGFAYSVPPIRWKQYPATNFLITISSHVGLAFTTYTATRSALGLPFVWSPAFAFIIAFMTVMGMTIAFAKDISDIEGDAKYGVSTVATKLGARKMTLVVSGVLLLNYLVSISIGIIWPQVFKSNIMILSHAILAFALIFQTRRLALANYASGPSRQFFEFIWLLYYAEYFVYVFI

SEQ ID NO: 409 - DNA, 951 bp, synthetic construct
  source 1..951: mol_type = other DNA
attgaaggttcagtgcatcatgaatcttggaactcaatcgcaactaaaattttgaactttggtcatacatgttggaaattgcaaagaccatacgttgttaagggtatgatttctattgctggcggtttatttggtagagaattgcgcaataacagacatttgttttcttggggtttgatggtgaaagcaacgttcgcattagttccaatcttgtcttttaatttctttgctgcagcaatgaaccaaatatatgatgttgatattgatagaattaataagccagatttgccattggtttctggtgaaatgtcaatcgaaactgcttggattttatctatcatcgttgcattgactggtttgatcgttacaattgtcttaaaatcagctccattgttcgtttttatatatatcttcggtatcttcgctggttttgcatactctgttccaccaattagatggaagcaataccctgggactaatttcttgatcacaatttcttcacatgttggtttggcttttactacgtacgcagctactgtctctgcattaggtttgccatttgtttggtcgccagcttttgtctttattatcgcttttatgactgttatgggtatgacaatcgctttcgcaaaggatatctctgatattgaaggtgacgctaaatacggtgtttcaactgttgctacaaaattgggtgcaagaaagatgactttggttgtttctggtgttttgttgttgaactatttggtttctatctcaatcggtattatttggccacaagtttttaaatctaacatcatgatcttgtcacatgctatcttggcattcatgttgatcttccaaacaagagacttagctttggcaaattatgcttctggcccatcaagacaatttttcgagtttatttggttgttgtactacgctgaatattttgtttacgtttttatttga

SEQ ID NO: 410 - protein, 316 aa, synthetic construct
IEGSVHHESWNSIATKILNFGHTCWKLQRPYVVKGMISIAGGLFGRELRNNRHLFSWGLMVKATFALVPILSFNFFAAAMNQIYDVDIDRINKPDLPLVSGEMSIETAWILSIIVALTGLIVTIVLKSAPLFVFIYIFGIFAGFAYSVPPIRWKQYPGTNFLITISSHVGLAFTTYAATVSALGLPFVWSPAFVFIIAFMTVMGMTIAFAKDISDIEGDAKYGVSTVATKLGARKMTLVVSGVLLLNYLVSISIGIIWPQVFKSNIMILSHAILAFMLIFQTRDLALANYASGPSRQFFEFIWLLYYAEYFVYVFI

SEQ ID NO: 411 - DNA, 951 bp, synthetic construct
  source 1..951: mol_type = other DNA
attgaaggttcagggcatcatgaatctgtgaactcaatcgcaactaaaattttgaactttggtcatacatgttggaaattgcaaagaccatacgttgttaagggtatgatttctattgctgcgggtttatttggtagagaattgctgaataacagacatttgttttcttggggtttgatggcgaaagcaatgttcgcattagttccaatcttgtcttttaatttctttgctgcatgcatgaaccaaatatatgatgttgatattgatagaattaataagccagatttgccattggtttctggtgaaatgtcaatcgaaactgcttggattttatctatcatcgttgcattgactggtttgatcgttacaattatgttaaaatcagctccattgttcgtttttatatatatcttcggtatcttcgctggttttgcatactctgttccaccaattagatggaagcaataccctgggactaatttcttgatcacaatttcttcacatgttggtttggcttttactgtgtacgcagctactgtctctgcattaggtttgccatttgtttggcagccagcttttgcgtttattatcgcttttatgactgttatgggtatgacaatcgctttcgcaaaggatatctctgatattgaaggtgacgctaaatacggtgtttcaactgttgctacaaaattgggtgcaagagtcatgacttgggttgtttctggtgttttgttgttgaactatttggtttctatctcaatcggtattatttggccacaagtttttaaatctaacatcatgatcttgtcacatgctatcttggcattcatgttgatcttccaaacaagagacttagctttggcaaattatgcttctggcccatcaagacaatttttcgagtttatttggttgttgtactacgctgaatattttgtttacgtttttatttga

SEQ ID NO: 412 - protein, 316 aa, synthetic construct
IEGSGHHESVNSIATKILNFGHTCWKLQRPYVVKGMISIAAGLFGRELLNNRHLFSWGLMAKAMFALVPILSFNFFAACMNQIYDVDIDRINKPDLPLVSGEMSIETAWILSIIVALTGLIVTIMLKSAPLFVFIYIFGIFAGFAYSVPPIRWKQYPGTNFLITISSHVGLAFTVYAATVSALGLPFVWQPAFAFIIAFMTVMGMTIAFAKDISDIEGDAKYGVSTVATKLGARVMTWVVSGVLLLNYLVSISIGIIWPQVFKSNIMILSHAILAFMLIFQTRDLALANYASGPSRQFFEFIWLLYYAEYFVYVFI

SEQ ID NO: 413 - DNA, 951 bp, synthetic construct
  source 1..951: mol_type = other DNA
attgaaggttcagtgcatcatgaatcttggaactcaatcgcaactaaaattttgaactttggtcatacatgttggaaattgcaaagaccatacgttgttaagggtatgatttctattgcttcgggtttatttggtagagaattgatgaataacagacatttgttttcttggggtttgatggcgaaagcaacgttcgcattagttccaatcttgtcttttaatttctttgctgcatgcatgaaccaaatatatgatgttgatattgatagaattaataagccagatttgccattggtttctggtgaaatgtcaatcgaaactgcttggattttatctatcatcgttgcattgactggtttgatcgttacaattatgttaaaatcagctccattgttcgtttttatatatatcttcggtatcttcgctggttttgcatactctgttccaccaattagatggaagcaataccctgggactaatttcttgatcacaatttcttcacatgttggtttggcttttactgtgtacacggctactgtctctgcattaggtttgccatttgtttgggcgccagcttttgcgtttattatcgcttttatgactgttatgggtatgacaatcgctttcgcaaaggatatctctgatattgaaggtgacgctaaatacggtgtttcaactgttgctacaaaattgggtgcaagaaagatgacttgggttgtttctggtgttttgttgttgaactatttggtttctatctcaatcggtattatttggccacaagtttttaaatctaacatcatgatcttgtcacatgctatcttggcattcgcgttgatcttccaaacaagagacttagctttggcaaattatgcttctaagccatcaagacaatttttcgagtttatttggttgttgtactacgctgaatattttgtttacgtttttatttga

SEQ ID NO: 414 - protein, 316 aa, synthetic construct
IEGSVHHESWNSIATKILNFGHTCWKLQRPYVVKGMISIASGLFGRELMNNRHLFSWGLMAKATFALVPILSFNFFAACMNQIYDVDIDRINKPDLPLVSGEMSIETAWILSIIVALTGLIVTIMLKSAPLFVFIYIFGIFAGFAYSVPPIRWKQYPGTNFLITISSHVGLAFTVYTATVSALGLPFVWAPAFAFIIAFMTVMGMTIAFAKDISDIEGDAKYGVSTVATKLGARKMTWVVSGVLLLNYLVSISIGIIWPQVFKSNIMILSHAILAFALIFQTRDLALANYASKPSRQFFEFIWLLYYAEYFVYVFI

SEQ ID NO: 415 - DNA, 951 bp, synthetic construct
  source 1..951: mol_type = other DNA
attgaaggttcaccacatcatgaatctgataactcaatcgcaactaaaattttgaactttggtcatacatgttggaaattgcaaagaccatacgttgttaagggtatgatttctattgctgcgggtttatttggtagagaattgctgaataacagacatttgttttcttggggtttgatggcgaaagcaacgttcgcattagttccaatcttgtcttttaatttctttgctgcagcaatgaaccaaatatatgatgttgatattgatagaattaataagccagatttgccattggtttctggtgaaatgtcaatcgaaactgcttggattttatctatcatcgttgcattgactggtttgatcgttacaattatgttaaaatcagctccattgttcgtttttatatatatcttcggtatcttcgctggttttgcatactctgttccaccaattagatggaagcaataccctgcgactaatttcttgatcacaatttcttcacatgttggtttggcttttactgtgtacggcgctactcgctctgcattaggtttgccatttgtttggcagccagcttttgcgtttattatcgcttttatgactgttatgggtatgacaatcgctttcgcaaaggatatctctgatattgaaggtgacgctaaatacggtgtttcaactgttgctacaaaattgggtgcaagatgcatgacttgggttgtttctggtgttttgttgttgaactatttggtttctatctcaatcggtattatttggccacaagtttttaaatctaacatcatgatcttgtcacatgctatcttggcattcatgttgatcttccaaacaagagacttagctttggcaaattatgcttctggcccatcaagacaatttttcgagtttatttggttgttgtactacgctgaatattttgtttacgtttttatttga

SEQ ID NO: 416 - protein, 316 aa, synthetic construct
IEGSPHHESDNSIATKILNFGHTCWKLQRPYVVKGMISIAAGLFGRELLNNRHLFSWGLMAKATFALVPILSFNFFAAAMNQIYDVDIDRINKPDLPLVSGEMSIETAWILSIIVALTGLIVTIMLKSAPLFVFIYIFGIFAGFAYSVPPIRWKQYPATNFLITISSHVGLAFTVYGATRSALGLPFVWQPAFAFIIAFMTVMGMTIAFAKDISDIEGDAKYGVSTVATKLGARCMTWVVSGVLLLNYLVSISIGIIWPQVFKSNIMILSHAILAFMLIFQTRDLALANYASGPSRQFFEFIWLLYYAEYFVYVFI

SEQ ID NO: 417 - DNA, 951 bp, synthetic construct
  source 1..951: mol_type = other DNA
attgaaggttcagggcatcatgaatctctgaactcaatcgcaactaaaattttgaactttggtcatacatgttggaaattgcaaagaccatacgttgttaagggtatgatttctattgcttcgggtttatttggtagagaattgatgaataacagacatttgttttcttggggtttgatggtgaaagcaatgttcgcattagttccaatcttgtcttttaatttctttgctgcatgcatgaaccaaatatatgatgttgatattgatagaattaataagccagatttgccattggtttctggtgaaatgtcaatcgaaactgcttggattttatctatcatcgttgcattgactggtttgatcgttacaatttggttaaaatcagctccattgttcgtttttatatatatcttcggtatcttcgctggttttgcatactctgttccaccaattagatggaagcaataccctgcgactaatttcttgatcacaatttcttcacatgttggtttggcttttactgcgtacggcgctactcgctctgcattaggtttgccatttgtttggtcgccagcttttgcgtttattatcgcttttatgactgttatgggtatgacaatcgctttcgcaaaggatatctctgatattgaaggtgacgctaaatacggtgtttcaactgttgctacaaaattgggtgcaagaaagatgacttgggttgtttctggtgttttgttgttgaactatttggtttctatctcaatcggtattatttggccacaagtttttaaatctaacatcatgatcttgtcacatgctatcttggcattcatgttgatcttccaaacaagagacttagctttggcaaattatgcttctggcccatcaagacaatttttcgagtttatttggttgttgtactacgctgaatattttgtttacgtttttatttga

SEQ ID NO: 418 - protein, 316 aa, synthetic construct
IEGSGHHESLNSIATKILNFGHTCWKLQRPYVVKGMISIASGLFGRELMNNRHLFSWGLMVKAMFALVPILSFNFFAACMNQIYDVDIDRINKPDLPLVSGEMSIETAWILSIIVALTGLIVTIWLKSAPLFVFIYIFGIFAGFAYSVPPIRWKQYPATNFLITISSHVGLAFTAYGATRSALGLPFVWSPAFAFIIAFMTVMGMTIAFAKDISDIEGDAKYGVSTVATKLGARKMTWVVSGVLLLNYLVSISIGIIWPQVFKSNIMILSHAILAFMLIFQTRDLALANYASGPSRQFFEFIWLLYYAEYFVYVFI

SEQ ID NO: 419 - DNA, 951 bp, synthetic construct
  source 1..951: mol_type = other DNA
attgaaggttcagtgcatcatgaatcttggaactcaatcgcaactaaaattttgaactttggtcatacatgttggaaattgcaaagaccatacgttgttaagggtatgatttctattgctggcggtttatttggtagagaattgcgcaataacagacatttgttttcttggggtttgatggcgaaagcaatgttcgcattagttccaatcttgtcttttaatttctttgctgcagcaatgaaccaaatatatgatgttgatattgatagaattaataagccagatttgccattggtttctggtgaaatgtcaatcgaaactgcttggattttatctatcatcgttgcattgactggtttgatcgttacaattgtcttaaaatcagctccattgttcgtttttatatatatcttcggtatcttcgctggttttgcatactctgttccaccaattagatggaagcaataccctgcgactaatttcttgatcacaatttcttcacatgttggtttggcttttactgtgtacacggctactcgctctgcattaggtttgccatttgtttggtcgccagcttttgtctttattatcgcttttatgactgttatgggtatgacaatcgctttcgcaaaggatatctctgatattgaaggtgacgctaaatacggtgtttcaactgttgctacaaaattgggtgcaagatgcatgactttggttgtttctggtgttttgttgttgaactatttggtttctatctcaatcggtattatttggccacaagtttttaaatctaacatcatgatcttgtcacatgctatcttggcattcatgttgatcttccaaacaagacgcttagctttggcaaattatgcttctaagccatcaagacaatttttcgagtttatttggttgttgtactacgctgaatattttgtttacgtttttatttga

SEQ ID NO: 420 - protein, 316 aa, synthetic construct
IEGSVHHESWNSIATKILNFGHTCWKLQRPYVVKGMISIAGGLFGRELRNNRHLFSWGLMAKAMFALVPILSFNFFAAAMNQIYDVDIDRINKPDLPLVSGEMSIETAWILSIIVALTGLIVTIVLKSAPLFVFIYIFGIFAGFAYSVPPIRWKQYPATNFLITISSHVGLAFTVYTATRSALGLPFVWSPAFVFIIAFMTVMGMTIAFAKDISDIEGDAKYGVSTVATKLGARCMTLVVSGVLLLNYLVSISIGIIWPQVFKSNIMILSHAILAFMLIFQTRRLALANYASKPSRQFFEFIWLLYYAEYFVYVFI

SEQ ID NO: 421 - DNA, 951 bp, synthetic construct
  source 1..951: mol_type = other DNA
attgaaggttcagtgcatcatgaatctgtgaactcaatcgcaactaaaattttgaactttggtcatacatgttggaaattgcaaagaccatacgttgttaagggtatgatttctattgctgcgggtttatttggtagagaattgctgaataacagacatttgttttcttggggtttgatggtgaaagcaatgttcgcattagttccaatcttgtcttttaatttctttgctgcagcaatgaaccaaatatatgatgttgatattgatagaattaataagccagatttgccattggtttctggtgaaatgtcaatcgaaactgcttggattttatctatcatcgttgcattgactggtttgatcgttacaatttggttaaaatcagctccattgttcgtttttatatatatcttcggtatcttcgctggttttgcatactctgttccaccaattagatggaagcaataccctgcgactaatttcttgatcacaatttcttcacatgttggtttggcttttactgcgtacggcgctactcgctctgcattaggtttgccatttgtttggtcgccagcttttgtctttattatcgcttttatgactgttatgggtatgacaatcgctttcgcaaaggatatctctgatattgaaggtgacgctaaatacggtgtttcaactgttgctacaaaattgggtgcaagatgcatgactttggttgtttctggtgttttgttgttgaactatttggtttctatctcaatcggtattatttggccacaagtttttaaatctaacatcatgatcttgtcacatgctatcttggcattcgcgttgatcttccaaacaagagacttagctttggcaaattatgcttctggcccatcaagacaatttttcgagtttatttggttgttgtactacgctgaatattttgtttacgtttttatttga

SEQ ID NO: 422 - protein, 316 aa, synthetic construct
IEGSVHHESVNSIATKILNFGHTCWKLQRPYVVKGMISIAAGLFGRELLNNRHLFSWGLMVKAMFALVPILSFNFFAAAMNQIYDVDIDRINKPDLPLVSGEMSIETAWILSIIVALTGLIVTIWLKSAPLFVFIYIFGIFAGFAYSVPPIRWKQYPATNFLITISSHVGLAFTAYGATRSALGLPFVWSPAFVFIIAFMTVMGMTIAFAKDISDIEGDAKYGVSTVATKLGARCMTLVVSGVLLLNYLVSISIGIIWPQVFKSNIMILSHAILAFALIFQTRDLALANYASGPSRQFFEFIWLLYYAEYFVYVFI

SEQ ID NO: 423 - DNA, 951 bp, synthetic construct
  source 1..951: mol_type = other DNA
attgaaggttcagggcatcatgaatcttggaactcaatcgcaactaaaattttgaactttggtcatacatgttggaaattgcaaagaccatacgttgttaagggtatgatttctattgctggcggtttatttggtagagaattgctgaataacagacatttgttttcttggggtttgatggtgaaagcatggttcgcattagttccaatcttgtcttttaatttctttgctgcatgcatgaaccaaatatatgatgttgatattgatagaattaataagccagatttgccattggtttctggtgaaatgtcaatcgaaactgcttggattttatctatcatcgttgcattgactggtttgatcgttacaatttggttaaaatcagctccattgttcgtttttatatatatcttcggtatcttcgctggttttgcatactctgttccaccaattagatggaagcaataccctgggactaatttcttgatcacaatttcttcacatgttggtttggcttttactgcgtacacggctactgtctctgcattaggtttgccatttgtttgggcgccagcttttgcgtttattatcgcttttatgactgttatgggtatgacaatcgctttcgcaaaggatatctctgatattgaaggtgacgctaaatacggtgtttcaactgttgctacaaaattgggtgcaagagtcatgacttgggttgtttctggtgttttgttgttgaactatttggtttctatctcaatcggtattatttggccacaagtttttaaatctaacatcatgatcttgtcacatgctatcttggcattcatgttgatcttccaaacaagaaagttagctttggcaaattatgcttctaagccatcaagacaatttttcgagtttatttggttgttgtactacgctgaatattttgtttacgtttttatttga

SEQ ID NO: 424 - protein, 316 aa, synthetic construct
IEGSGHHESWNSIATKILNFGHTCWKLQRPYVVKGMISIAGGLFGRELLNNRHLFSWGLMVKAWFALVPILSFNFFAACMNQIYDVDIDRINKPDLPLVSGEMSIETAWILSIIVALTGLIVTIWLKSAPLFVFIYIFGIFAGFAYSVPPIRWKQYPGTNFLITISSHVGLAFTAYTATVSALGLPFVWAPAFAFIIAFMTVMGMTIAFAKDISDIEGDAKYGVSTVATKLGARVMTWVVSGVLLLNYLVSISIGIIWPQVFKSNIMILSHAILAFMLIFQTRKLALANYASKPSRQFFEFIWLLYYAEYFVYVFI

SEQ ID NO: 425 - DNA, 951 bp, synthetic construct
  source 1..951: mol_type = other DNA
attgaaggttcagggcatcatgaatctgtgaactcaatcgcaactaaaattttgaactttggtcatacatgttggaaattgcaaagaccatacgttgttaagggtatgatttctattgcttcgggtttatttggtagagaattgatgaataacagacatttgttttcttggggtttgatggtgaaagcatggttcgcattagttccaatcttgtcttttaatttctttgctgcagcaatgaaccaaatatatgatgttgatattgatagaattaataagccagatttgccattggtttctggtgaaatgtcaatcgaaactgcttggattttatctatcatcgttgcattgactggtttgatcgttacaatttggttaaaatcagctccattgttcgtttttatatatatcttcggtatcttcgctggttttgcatactctgttccaccaattagatggaagcaataccctgggactaatttcttgatcacaatttcttcacatgttggtttggcttttactgtgtacacggctactcgctctgcattaggtttgccatttgtttggcagccagcttttgcgtttattatcgcttttatgactgttatgggtatgacaatcgctttcgcaaaggatatctctgatattgaaggtgacgctaaatacggtgtttcaactgttgctacaaaattgggtgcaagatgcatgactttggttgtttctggtgttttgttgttgaactatttggtttctatctcaatcggtattatttggccacaagtttttaaatctaacatcatgatcttgtcacatgctatcttggcattcgcgttgatcttccaaacaagagacttagctttggcaaattatgcttctaagccatcaagacaatttttcgagtttatttggttgttgtactacgctgaatattttgtttacgtttttatttga

SEQ ID NO: 426 - protein, 316 aa, synthetic construct
IEGSGHHESVNSIATKILNFGHTCWKLQRPYVVKGMISIASGLFGRELMNNRHLFSWGLMVKAWFALVPILSFNFFAAAMNQIYDVDIDRINKPDLPLVSGEMSIETAWILSIIVALTGLIVTIWLKSAPLFVFIYIFGIFAGFAYSVPPIRWKQYPGTNFLITISSHVGLAFTVYTATRSALGLPFVWQPAFAFIIAFMTVMGMTIAFAKDISDIEGDAKYGVSTVATKLGARCMTLVVSGVLLLNYLVSISIGIIWPQVFKSNIMILSHAILAFALIFQTRDLALANYASKPSRQFFEFIWLLYYAEYFVYVFI

SEQ ID NO: 427 - DNA, 951 bp, synthetic construct
  source 1..951: mol_type = other DNA
attgaaggttcagggcatcatgaatctctgaactcaatcgcaactaaaattttgaactttggtcatacatgttggaaattgcaaagaccatacgttgttaagggtatgatttctattgctggcggtttatttggtagagaattgctgaataacagacatttgttttcttggggtttgatggcgaaagcaatgttcgcattagttccaatcttgtcttttaatttctttgctgcagcaatgaaccaaatatatgatgttgatattgatagaattaataagccagatttgccattggtttctggtgaaatgtcaatcgaaactgcttggattttatctatcatcgttgcattgactggtttgatcgttacaattgtcttaaaatcagctccattgttcgtttttatatatatcttcggtatcttcgctggttttgcatactctgttccaccaattagatggaagcaataccctgcgactaatttcttgatcacaatttcttcacatgttggtttggcttttactgcgtacggcgctactgtctctgcattaggtttgccatttgtttggggcccagcttttctgtttattatcgcttttatgactgttatgggtatgacaatcgctttcgcaaaggatatctctgatattgaaggtgacgctaaatacggtgtttcaactgttgctacaaaattgggtgcaagagtcatgacttgggttgtttctggtgttttgttgttgaactatttggtttctatctcaatcggtattatttggccacaagtttttaaatctaacatcatgatcttgtcacatgctatcttggcattcatgttgatcttccaaacaagacgcttaggtttggcaaattatgcttctggcccatcaagacaatttttcgagtttatttggttgttgtactacgctgaatattttgtttacgtttttatttga

SEQ ID NO: 428 - protein, 316 aa, synthetic construct
IEGSGHHESLNSIATKILNFGHTCWKLQRPYVVKGMISIAGGLFGRELLNNRHLFSWGLMAKAMFALVPILSFNFFAAAMNQIYDVDIDRINKPDLPLVSGEMSIETAWILSIIVALTGLIVTIVLKSAPLFVFIYIFGIFAGFAYSVPPIRWKQYPATNFLITISSHVGLAFTAYGATVSALGLPFVWGPAFLFIIAFMTVMGMTIAFAKDISDIEGDAKYGVSTVATKLGARVMTWVVSGVLLLNYLVSISIGIIWPQVFKSNIMILSHAILAFMLIFQTRRLGLANYASGPSRQFFEFIWLLYYAEYFVYVFI

SEQ ID NO: 429 - DNA, 951 bp, synthetic construct
  source 1..951: mol_type = other DNA
attgaaggttcagggcatcatgaatcttggaactcaatcgcaactaaaattttgaactttggtcatacatgttggaaattgcaaagaccatacgttgttaagggtatgatttctattgctgcgggtttatttggtagagaattgctgaataacagacatttgttttcttggggtttgatggcgaaagcaatgttcgcattagttccaatcttgtcttttaatttctttgctgcagcaatgaaccaaatatatgatgttgatattgatagaattaataagccagatttgccattggtttctggtgaaatgtcaatcgaaactgcttggattttatctatcatcgttgcattgactggtttgatcgttacaatttggttaaaatcagctccattgttcgtttttatatatatcttcggtatcttcgctggttttgcatactctgttccaccaattagatggaagcaataccctgggactaatttcttgatcacaatttcttcacatgttggtttggcttttactgggtacacggctactctgtctgcattaggtttgccatttgtttggcagccagcttttgcgtttattatcgcttttatgactgttatgggtatgacaatcgctttcgcaaaggatatctctgatattgaaggtgacgctaaatacggtgtttcaactgttgctacaaaattgggtgcaagaaagatgactttggttgtttctggtgttttgttgttgaactatttggtttctatctcaatcggtattatttggccacaagtttttaaatctaacatcatgatcttgtcacatgctatcttggcattcgcgttgatcttccaaacaagacgcttagctttggcaaattatgcttctggcccatcaagacaatttttcgagtttatttggttgttgtactacgctgaatattttgtttacgtttttatttga

SEQ ID NO: 430 - protein, 316 aa, synthetic construct
IEGSGHHESWNSIATKILNFGHTCWKLQRPYVVKGMISIAAGLFGRELLNNRHLFSWGLMAKAMFALVPILSFNFFAAAMNQIYDVDIDRINKPDLPLVSGEMSIETAWILSIIVALTGLIVTIWLKSAPLFVFIYIFGIFAGFAYSVPPIRWKQYPGTNFLITISSHVGLAFTGYTATLSALGLPFVWQPAFAFIIAFMTVMGMTIAFAKDISDIEGDAKYGVSTVATKLGARKMTLVVSGVLLLNYLVSISIGIIWPQVFKSNIMILSHAILAFALIFQTRRLALANYASGPSRQFFEFIWLLYYAEYFVYVFI

SEQ ID NO: 431 - DNA, 951 bp, synthetic construct
  source 1..951: mol_type = other DNA
attgaaggttcagtgcatcatgaatctctgaactcaatcgcaactaaaattttgaactttggtcatacatgttggaaattgcaaagaccatacgttgttaagggtatgatttctattgcttcgggtttatttggtagagaattgctgaataacagacatttgttttcttggggtttgatggcgaaagcactgttcgcattagttccaatcttgtcttttaatttctttgctgcatgcatgaaccaaatatatgatgttgatattgatagaattaataagccagatttgccattggtttctggtgaaatgtcaatcgaaactgcttggattttatctatcatcgttgcattgactggtttgatcgttacaattatgttaaaatcagctccattgttcgtttttatatatatcttcggtatcttcgctggttttgcatactctgttccaccaattagatggaagcaataccctgcgactaatttcttgatcacaatttcttcacatgttggtttggcttttactgggtacgcagctactcgctctgcattaggtttgccatttgtttggcagccagcttttgtctttattatcgcttttatgactgttatgggtatgacaatcgctttcgcaaaggatatctctgatattgaaggtgacgctaaatacggtgtttcaactgttgctacaaaattgggtgcaagatgcatgactttggttgtttctggtgttttgttgttgaactatttggtttctatctcaatcggtattatttggccacaagtttttaaatctaacatcatgatcttgtcacatgctatcttggcattcatgttgatcttccaaacaagacgcttagctttggcaaattatgcttctggcccatcaagacaatttttcgagtttatttggttgttgtactacgctgaatattttgtttacgtttttatttga

SEQ ID NO: 432 - protein, 316 aa, synthetic construct
IEGSVHHESLNSIATKILNFGHTCWKLQRPYVVKGMISIASGLFGRELLNNRHLFSWGLMAKALFALVPILSFNFFAACMNQIYDVDIDRINKPDLPLVSGEMSIETAWILSIIVALTGLIVTIMLKSAPLFVFIYIFGIFAGFAYSVPPIRWKQYPATNFLITISSHVGLAFTGYAATRSALGLPFVWQPAFVFIIAFMTVMGMTIAFAKDISDIEGDAKYGVSTVATKLGARCMTLVVSGVLLLNYLVSISIGIIWPQVFKSNIMILSHAILAFMLIFQTRRLALANYASGPSRQFFEFIWLLYYAEYFVYVFI

SEQ ID NO: 433 - DNA, 951 bp, synthetic construct
  source 1..951: mol_type = other DNA
attgaaggttcaccacatcatgaatctgataactcaatcgcaactaaaattttgaactttggtcatacatgttggaaattgcaaagaccatacgttgttaagggtatgatttctattgcttcgggtttatttggtagagaattgctgaataacagacatttgttttcttggggtttgatggcgaaagcaatgttcgcattagttccaatcttgtcttttaatttctttgctgcagcaatgaaccaaatatatgatgttgatattgatagaattaataagccagatttgccattggtttctggtgaaatgtcaatcgaaactgcttggattttatctatcatcgttgcattgactggtttgatcgttacaattatgttaaaatcagctccattgttcgtttttatatatatcttcggtatcttcgctggttttgcatactctgttccaccaattagatggaagcaataccctgcgactaatttcttgatcacaatttcttcacatgttggtttggcttttactgtgtacacggctactcgctctgcattaggtttgccatttgtttggggcccagcttttctgtttattatcgcttttatgactgttatgggtatgacaatcgctttcgcaaaggatatctctgatattgaaggtgacgctaaatacggtgtttcaactgttgctacaaaattgggtgcaagagtcatgactttggttgtttctggtgttttgttgttgaactatttggtttctatctcaatcggtattatttggccacaagtttttaaatctaacatcatgatcttgtcacatgctatcttggcattcgcgttgatcttccaaacaagagacttagctttggcaaattatgcttctggcccatcaagacaatttttcgagtttatttggttgttgtactacgctgaatattttgtttacgtttttatttga

SEQ ID NO: 434 - protein, 316 aa, synthetic construct
IEGSPHHESDNSIATKILNFGHTCWKLQRPYVVKGMISIASGLFGRELLNNRHLFSWGLMAKAMFALVPILSFNFFAAAMNQIYDVDIDRINKPDLPLVSGEMSIETAWILSIIVALTGLIVTIMLKSAPLFVFIYIFGIFAGFAYSVPPIRWKQYPATNFLITISSHVGLAFTVYTATRSALGLPFVWGPAFLFIIAFMTVMGMTIAFAKDISDIEGDAKYGVSTVATKLGARVMTLVVSGVLLLNYLVSISIGIIWPQVFKSNIMILSHAILAFALIFQTRDLALANYASGPSRQFFEFIWLLYYAEYFVYVFI

SEQ ID NO: 435 - DNA, 951 bp, synthetic construct
  source 1..951: mol_type = other DNA
attgaaggttcagggcatcatgaatctgtgaactcaatcgcaactaaaattttgaactttggtcatacatgttggaaattgcaaagaccatacgttgttaagggtatgatttctattgctgcgggtttatttggtagagaattgatgaataacagacatttgttttcttggggtttgatggcgaaagcaacgttcgcattagttccaatcttgtcttttaatttctttgctgcatgcatgaaccaaatatatgatgttgatattgatagaattaataagccagatttgccattggtttctggtgaaatgtcaatcgaaactgcttggattttatctatcatcgttgcattgactggtttgatcgttacaattgtcttaaaatcagctccattgttcgtttttatatatatcttcggtatcttcgctggttttgcatactctgttccaccaattagatggaagcaataccctgcgactaatttcttgatcacaatttcttcacatgttggtttggcttttactgtgtacgcagctactctgtctgcattaggtttgccatttgtttggtcgccagcttttgcgtttattatcgcttttatgactgttatgggtatgacaatcgctttcgcaaaggatatctctgatattgaaggtgacgctaaatacggtgtttcaactgttgctacaaaattgggtgcaagagtcatgacttgggttgtttctggtgttttgttgttgaactatttggtttctatctcaatcggtattatttggccacaagtttttaaatctaacatcatgatcttgtcacatgctatcttggcattcatgttgatcttccaaacaagacgcttagctttggcaaattatgcttctggcccatcaagacaatttttcgagtttatttggttgttgtactacgctgaatattttgtttacgtttttatttga

SEQ ID NO: 436 - protein, 316 aa, synthetic construct
IEGSGHHESVNSIATKILNFGHTCWKLQRPYVVKGMISIAAGLFGRELMNNRHLFSWGLMAKATFALVPILSFNFFAACMNQIYDVDIDRINKPDLPLVSGEMSIETAWILSIIVALTGLIVTIVLKSAPLFVFIYIFGIFAGFAYSVPPIRWKQYPATNFLITISSHVGLAFTVYAATLSALGLPFVWSPAFAFIIAFMTVMGMTIAFAKDISDIEGDAKYGVSTVATKLGARVMTWVVSGVLLLNYLVSISIGIIWPQVFKSNIMILSHAILAFMLIFQTRRLALANYASGPSRQFFEFIWLLYYAEYFVYVFI

SEQ ID NO: 437 - DNA, 951 bp, synthetic construct
  source 1..951: mol_type = other DNA
attgaaggttcagggcatcatgaatctgtgaactcaatcgcaactaaaattttgaactttggtcatacatgttggaaattgcaaagaccatacgttgttaagggtatgatttctattgctggcggtttatttggtagagaattgcgcaataacagacatttgttttcttggggtttgatggcgaaagcaacgttcgcattagttccaatcttgtcttttaatttctttgctgcagcaatgaaccaaatatatgatgttgatattgatagaattaataagccagatttgccattggtttctggtgaaatgtcaatcgaaactgcttggattttatctatcatcgttgcattgactggtttgatcgttacaatttggttaaaatcagctccattgttcgtttttatatatatcttcggtatcttcgctggttttgcatactctgttccaccaattagatggaagcaataccctgcgactaatttcttgatcacaatttcttcacatgttggtttggcttttactgggtacacggctactctgtctgcattaggtttgccatttgtttggtcgccagcttttctgtttattatcgcttttatgactgttatgggtatgacaatcgctttcgcaaaggatatctctgatattgaaggtgacgctaaatacggtgtttcaactgttgctacaaaattgggtgcaagatgcatgactttggttgtttctggtgttttgttgttgaactatttggtttctatctcaatcggtattatttggccacaagtttttaaatctaacatcatgatcttgtcacatgctatcttggcattcatgttgatcttccaaacaagagacttagctttggcaaattatgcttctggcccatcaagacaatttttcgagtttatttggttgttgtactacgctgaatattttgtttacgtttttatttga

SEQ ID NO: 438 - protein, 316 aa, synthetic construct
IEGSGHHESVNSIATKILNFGHTCWKLQRPYVVKGMISIAGGLFGRELRNNRHLFSWGLMAKATFALVPILSFNFFAAAMNQIYDVDIDRINKPDLPLVSGEMSIETAWILSIIVALTGLIVTIWLKSAPLFVFIYIFGIFAGFAYSVPPIRWKQYPATNFLITISSHVGLAFTGYTATLSALGLPFVWSPAFLFIIAFMTVMGMTIAFAKDISDIEGDAKYGVSTVATKLGARCMTLVVSGVLLLNYLVSISIGIIWPQVFKSNIMILSHAILAFMLIFQTRDLALANYASGPSRQFFEFIWLLYYAEYFVYVFI

SEQ ID NO: 439 - DNA, 951 bp, synthetic construct
  source 1..951: mol_type = other DNA
attgaaggttcagggcatcatgaatcttggaactcaatcgcaactaaaattttgaactttggtcatacatgttggaaattgcaaagaccatacgttgttaagggtatgatttctattgctgcgggtttatttggtagagaattgatgaataacagacatttgttttcttggggtttgatggtgaaagcaacgttcgcattagttccaatcttgtcttttaatttctttgctgcatgcatgaaccaaatatatgatgttgatattgatagaattaataagccagatttgccattggtttctggtgaaatgtcaatcgaaactgcttggattttatctatcatcgttgcattgactggtttgatcgttacaattatgttaaaatcagctccattgttcgtttttatatatatcttcggtatcttcgctggttttgcatactctgttccaccaattagatggaagcaataccctgcgactaatttcttgatcacaatttcttcacatgttggtttggcttttactacgtacgcagctactctgtctgcattaggtttgccatttgtttgggcgccagcttttctgtttattatcgcttttatgactgttatgggtatgacaatcgctttcgcaaaggatatctctgatattgaaggtgacgctaaatacggtgtttcaactgttgctacaaaattgggtgcaagatgcatgacttgggttgtttctggtgttttgttgttgaactatttggtttctatctcaatcggtattatttggccacaagtttttaaatctaacatcatgatcttgtcacatgctatcttggcattcatgttgatcttccaaacaagagacttagctttggcaaattatgcttctggcccatcaagacaatttttcgagtttatttggttgttgtactacgctgaatattttgtttacgtttttatttga

SEQ ID NO: 440 - protein, 316 aa, synthetic construct
IEGSGHHESWNSIATKILNFGHTCWKLQRPYVVKGMISIAAGLFGRELMNNRHLFSWGLMVKATFALVPILSFNFFAACMNQIYDVDIDRINKPDLPLVSGEMSIETAWILSIIVALTGLIVTIMLKSAPLFVFIYIFGIFAGFAYSVPPIRWKQYPATNFLITISSHVGLAFTTYAATLSALGLPFVWAPAFLFIIAFMTVMGMTIAFAKDISDIEGDAKYGVSTVATKLGARCMTWVVSGVLLLNYLVSISIGIIWPQVFKSNIMILSHAILAFMLIFQTRDLALANYASGPSRQFFEFIWLLYYAEYFVYVFI

SEQ ID NO: 441 - DNA, 951 bp, synthetic construct
  source 1..951: mol_type = other DNA
attgaaggttcagggcatcatgaatctctgaactcaatcgcaactaaaattttgaactttggtcatacatgttggaaattgcaaagaccatacgttgttaagggtatgatttctattgctgcgggtttatttggtagagaattgctgaataacagacatttgttttcttggggtttgatggcgaaagcactgttcgcattagttccaatcttgtcttttaatttctttgctgcagcaatgaaccaaatatatgatgttgatattgatagaattaataagccagatttgccattggtttctggtgaaatgtcaatcgaaactgcttggattttatctatcatcgttgcattgactggtttgatcgttacaatttggttaaaatcagctccattgttcgtttttatatatatcttcggtatcttcgctggttttgcatactctgttccaccaattagatggaagcaataccctgcgactaatttcttgatcacaatttcttcacatgttggtttggcttttactgggtacacggctactgtctctgcattaggtttgccatttgtttgggcgccagcttttgcgtttattatcgcttttatgactgttatgggtatgacaatcgctttcgcaaaggatatctctgatattgaaggtgacgctaaatacggtgtttcaactgttgctacaaaattgggtgcaagatgcatgacttgggttgtttctggtgttttgttgttgaactatttggtttctatctcaatcggtattatttggccacaagtttttaaatctaacatcatgatcttgtcacatgctatcttggcattcatgttgatcttccaaacaagacgcttagctttggcaaattatgcttctggcccatcaagacaatttttcgagtttatttggttgttgtactacgctgaatattttgtttacgtttttatttga

SEQ ID NO: 442 - protein, 316 aa, synthetic construct
IEGSGHHESLNSIATKILNFGHTCWKLQRPYVVKGMISIAAGLFGRELLNNRHLFSWGLMAKALFALVPILSFNFFAAAMNQIYDVDIDRINKPDLPLVSGEMSIETAWILSIIVALTGLIVTIWLKSAPLFVFIYIFGIFAGFAYSVPPIRWKQYPATNFLITISSHVGLAFTGYTATVSALGLPFVWAPAFAFIIAFMTVMGMTIAFAKDISDIEGDAKYGVSTVATKLGARCMTWVVSGVLLLNYLVSISIGIIWPQVFKSNIMILSHAILAFMLIFQTRRLALANYASGPSRQFFEFIWLLYYAEYFVYVFI

SEQ ID NO: 443 - DNA, 951 bp, synthetic construct
  source 1..951: mol_type = other DNA
attgaaggttcagggcatcatgaatctctgaactcaatcgcaactaaaattttgaactttggtcatacatgttggaaattgcaaagaccatacgttgttaagggtatgatttctattgctgcgggtttatttggtagagaattgatgaataacagacatttgttttcttggggtttgatggcgaaagcactgttcgcattagttccaatcttgtcttttaatttctttgctgcatgcatgaaccaaatatatgatgttgatattgatagaattaataagccagatttgccattggtttctggtgaaatgtcaatcgaaactgcttggattttatctatcatcgttgcattgactggtttgatcgttacaattgtcttaaaatcagctccattgttcgtttttatatatatcttcggtatcttcgctggttttgcatactctgttccaccaattagatggaagcaataccctgcgactaatttcttgatcacaatttcttcacatgttggtttggcttttactgggtacgcagctactgtctctgcattaggtttgccatttgtttgggcgccagcttttctggttattatcgcttttatgactgttatgggtatgacaatcgctttcgcaaaggatatctctgatattgaaggtgacgctaaatacggtgtttcaactgttgctacaaaattgggtgcaagatgcatgacttgggttgtttctggtgttttgttgttgaactatttggtttctatctcaatcggtattatttggccacaagtttttaaatctaacatcatgatcttgtcacatgctatcttggcattcgcgttgatcttccaaacaagagacttagctttggcaaattatgcttctggcccatcaagacaatttttcgagtttatttggttgttgtactacgctgaatattttgtttacgtttttatttga

SEQ ID NO: 444 - protein, 316 aa, synthetic construct
IEGSGHHESLNSIATKILNFGHTCWKLQRPYVVKGMISIAAGLFGRELMNNRHLFSWGLMAKALFALVPILSFNFFAACMNQIYDVDIDRINKPDLPLVSGEMSIETAWILSIIVALTGLIVTIVLKSAPLFVFIYIFGIFAGFAYSVPPIRWKQYPATNFLITISSHVGLAFTGYAATVSALGLPFVWAPAFLVIIAFMTVMGMTIAFAKDISDIEGDAKYGVSTVATKLGARCMTWVVSGVLLLNYLVSISIGIIWPQVFKSNIMILSHAILAFALIFQTRDLALANYASGPSRQFFEFIWLLYYAEYFVYVFI

SEQ ID NO: 445 - DNA, 951 bp, synthetic construct
  source 1..951: mol_type = other DNA
attgaaggttcagtgcatcatgaatctctgaactcaatcgcaactaaaattttgaactttggtcatacatgttggaaattgcaaagaccatacgttgttaagggtatgatttctattgctggcggtttatttggtagagaattgatgaataacagacatttgttttcttggggtttgatggtgaaagcaacgttcgcattagttccaatcttgtcttttaatttctttgctgcatgcatgaaccaaatatatgatgttgatattgatagaattaataagccagatttgccattggtttctggtgaaatgtcaatcgaaactgcttggattttatctatcatcgttgcattgactggtttgatcgttacaatttggttaaaatcagctccattgttcgtttttatatatatcttcggtatcttcgctggttttgcatactctgttccaccaattagatggaagcaataccctgcgactaatttcttgatcacaatttcttcacatgttggtttggcttttactacgtacgcagctactgtctctgcattaggtttgccatttgtttggtcgccagcttttgtctttattatcgcttttatgactgttatgggtatgacaatcgctttcgcaaaggatatctctgatattgaaggtgacgctaaatacggtgtttcaactgttgctacaaaattgggtgcaagatgcatgacttgggttgtttctggtgttttgttgttgaactatttggtttctatctcaatcggtattatttggccacaagtttttaaatctaacatcatgatcttgtcacatgctatcttggcattcgcgttgatcttccaaacaagagacttagctttggcaaattatgcttctggcccatcaagacaatttttcgagtttatttggttgttgtactacgctgaatattttgtttacgtttttatttga

SEQ ID NO: 446 - protein, 316 aa, synthetic construct
IEGSVHHESLNSIATKILNFGHTCWKLQRPYVVKGMISIAGGLFGRELMNNRHLFSWGLMVKATFALVPILSFNFFAACMNQIYDVDIDRINKPDLPLVSGEMSIETAWILSIIVALTGLIVTIWLKSAPLFVFIYIFGIFAGFAYSVPPIRWKQYPATNFLITISSHVGLAFTTYAATVSALGLPFVWSPAFVFIIAFMTVMGMTIAFAKDISDIEGDAKYGVSTVATKLGARCMTWVVSGVLLLNYLVSISIGIIWPQVFKSNIMILSHAILAFALIFQTRDLALANYASGPSRQFFEFIWLLYYAEYFVYVFI

SEQ ID NO: 447 - DNA, 951 bp, synthetic construct
  source 1..951: mol_type = other DNA
attgaaggttcagggcatcatgaatcttggaactcaatcgcaactaaaattttgaactttggtcatacatgttggaaattgcaaagaccatacgttgttaagggtatgatttctattgcttcgggtttatttggtagagaattgctgaataacagacatttgttttcttggggtttgatggtgaaagcactgttcgcattagttccaatcttgtcttttaatttctttgctgcagcaatgaaccaaatatatgatgttgatattgatagaattaataagccagatttgccattggtttctggtgaaatgtcaatcgaaactgcttggattttatctatcatcgttgcattgactggtttgatcgttacaatttggttaaaatcagctccattgttcgtttttatatatatcttcggtatctttgctggttttgcatactctgttccaccaattagatggaagcaataccctgcgactaatttcttgatcacaatttcttcacatgttggtttggcttttactgcgtacggcgctactcgctctgcattaggtttgccatttgtttggggcccagcttttctgtttattatcgcttttatgactgttatgggtatgacaatcgctttcgcaaaggatatctctgatattgaaggtgacgctaaatacggtgtttcaactgttgctacaaaattgggtgcaagatgcatgacttgggttgtttctggtgttttgttgttgaactatttggtttctatctcaatcggtattatttggccacaagtttttaaatctaacatcatgatcttgtcacatgctatcttggcattcgcgttgatcttccaaacaagacgcttagctttggcaaattatgcttctggcccatcaagacaatttttcgagtttatttggttgttgtactacgctgaatattttgtttacgtttttatttga

SEQ ID NO: 448 - protein, 316 aa, synthetic construct
IEGSGHHESWNSIATKILNFGHTCWKLQRPYVVKGMISIASGLFGRELLNNRHLFSWGLMVKALFALVPILSFNFFAAAMNQIYDVDIDRINKPDLPLVSGEMSIETAWILSIIVALTGLIVTIWLKSAPLFVFIYIFGIFAGFAYSVPPIRWKQYPATNFLITISSHVGLAFTAYGATRSALGLPFVWGPAFLFIIAFMTVMGMTIAFAKDISDIEGDAKYGVSTVATKLGARCMTWVVSGVLLLNYLVSISIGIIWPQVFKSNIMILSHAILAFALIFQTRRLALANYASGPSRQFFEFIWLLYYAEYFVYVFI

SEQ ID NO: 449 - DNA, 951 bp, synthetic construct
  source 1..951: mol_type = other DNA
attgaaggttcagggcatcatgaatctgtgaactcaatcgcaactaaaattttgaactttggtcatacatgttggaaattgcaaagaccatacgttgttaagggtatgatttctattgctgcgggtttatttggtagagaattgatgaataacagacatttgttttcttggggtttgatggcgaaagcagggttcgcattagttccaatcttgtcttttaatttctttgctgcagcaatgaaccaaatatatgatgttgatattgatagaattaataagccagatttgccattggtttctggtgaaatgtcaatcgaaactgcttggattttatctatcatcgttgcattgactggtttgatcgttacaattgtcttaaaatcagctccattgttcgtttttatatatatcttcggtatcttcgctggttttgcatactctgttccaccaattagatggaagcaataccctgggactaatttcttgatcacaatttcttcacatgttggtttggcttttactgcgtacgcagctactctgtctgcattaggtttgccatttgtttggcagccagcttttctgtttattatcgcttttatgactgttatgggtatgacaatcgctttcgcaaaggatatctctgatattgaaggtgacgctaaatacggtgtttcaactgttgctacaaaattgggtgcaagatgcatgacttgggttgtttctggtgttttgttgttgaactatttggtttctatctcaatcggtattatttggccacaagtttttaaatctaacatcatgatcttgtcacatgctatcttggcattcatgttgatcttccaaacaagagacttagctttggcaaattatgcttctgtcccatcaagacaatttttcgagtttatttggttgttgtactacgctgaatattttgtttacgtttttatttga

SEQ ID NO: 450 - protein, 316 aa, synthetic construct
IEGSGHHESVNSIATKILNFGHTCWKLQRPYVVKGMISIAAGLFGRELMNNRHLFSWGLMAKAGFALVPILSFNFFAAAMNQIYDVDIDRINKPDLPLVSGEMSIETAWILSIIVALTGLIVTIVLKSAPLFVFIYIFGIFAGFAYSVPPIRWKQYPGTNFLITISSHVGLAFTAYAATLSALGLPFVWQPAFLFIIAFMTVMGMTIAFAKDISDIEGDAKYGVSTVATKLGARCMTWVVSGVLLLNYLVSISIGIIWPQVFKSNIMILSHAILAFMLIFQTRDLALANYASVPSRQFFEFIWLLYYAEYFVYVFI

SEQ ID NO: 451 - DNA, 951 bp, synthetic construct
  source 1..951: mol_type = other DNA
attgaaggttcagggcatcatgaatcttggaactcaatcgcaactaaaattttgaactttggtcatacatgttggaaattgcaaagaccatacgttgttaagggtatgatttctattgctggcggtttatttggtagagaattgatgaataacagacatttgttttcttggggtttgatggcgaaagcatggttcgcattagttccaatcttgtcttttaatttctttgctgcatgcatgaaccaaatatatgatgttgatattgatagaattaataagccagatttgccattggtttctggtgaaatgtcaatcgaaactgcttggattttatctatcatcgttgcattgactggtttgatcgttacaattatgttaaaatcagctccattgttcgtttttatatatatcttcggtatcttcgctggttttgcatactctgttccaccaattagatggaagcaataccctgggactaatttcttgatcacaatttcttcacatgttggtttggcttttactgcgtacgcagctactctgtctgcattaggtttgccatttgtttgggcgccagcttttctgtttattatcgcttttatgactgttatgggtatgacaatcgctttcgcaaaggatatctctgatattgaaggtgacgctaaatacggtgtttcaactgttgctacaaaattgggtgcaagaaagatgacttgggttgtttctggtgttttgttgttgaactatttggtttctatctcaatcggtattatttggccacaagtttttaaatctaacatcatgatcttgtcacatgctatcttggcattcatgttgatcttccaaacaagagacttagctttggcaaattatgcttctggcccatcaagacaatttttcgagtttatttggttgttgtactacgctgaatattttgtttacgtttttatttga

SEQ ID NO: 452 - protein, 316 aa, synthetic construct
IEGSGHHESWNSIATKILNFGHTCWKLQRPYVVKGMISIAGGLFGRELMNNRHLFSWGLMAKAWFALVPILSFNFFAACMNQIYDVDIDRINKPDLPLVSGEMSIETAWILSIIVALTGLIVTIMLKSAPLFVFIYIFGIFAGFAYSVPPIRWKQYPGTNFLITISSHVGLAFTAYAATLSALGLPFVWAPAFLFIIAFMTVMGMTIAFAKDISDIEGDAKYGVSTVATKLGARKMTWVVSGVLLLNYLVSISIGIIWPQVFKSNIMILSHAILAFMLIFQTRDLALANYASGPSRQFFEFIWLLYYAEYFVYVFI

SEQ ID NO: 453 - DNA, 951 bp, synthetic construct
  source 1..951: mol_type = other DNA
attgaaggttcagtgcatcatgaatcttggaactcaatcgcaactaaaattttgaactttggtcatacatgttggaaattgcaaagaccatacgttgttaagggtatgatttctattgctggcggtttatttggtagagaattgctgaataacagacatttgttttcttggggtttgatggcgaaagcatggttcgcattagttccaatcttgtcttttaatttctttgctgcatgcatgaaccaaatatatgatgttgatattgatagaattaataagccagatttgccattggtttctggtgaaatgtcaatcgaaactgcttggattttatctatcatcgttgcattgactggtttgatcgttacaattgtcttaaaatcagctccattgttcgtttttatatatatcttcggtatcttcgctggttttgcatactctgttccaccaattagatggaagcaataccctgggactaatttcttgatcacaatttcttcacatgttggtttggcttttactgggtacggcgctactctgtctgcattaggtttgccatttgtttggtcgccagcttttgcgtttattatcgcttttatgactgttatgggtatgacaatcgctttcgcaaaggatatctctgatattgaaggtgacgctaaatacggtgtttcaactgttgctacaaaattgggtgcaagaaagatgactttggttgtttctggtgttttgttgttgaactatttggtttctatctcaatcggtattatttggccacaagtttttaaatctaacatcatgatcttgtcacatgctatcttggcattcgcgttgatcttccaaacaagagacttagctttggcaaattatgcttctgtcccatcaagacaatttttcgagtttatttggttgttgtactacgctgaatattttgtttacgtttttatttga

SEQ ID NO: 454 - protein, 316 aa, synthetic construct
IEGSVHHESWNSIATKILNFGHTCWKLQRPYVVKGMISIAGGLFGRELLNNRHLFSWGLMAKAWFALVPILSFNFFAACMNQIYDVDIDRINKPDLPLVSGEMSIETAWILSIIVALTGLIVTIVLKSAPLFVFIYIFGIFAGFAYSVPPIRWKQYPGTNFLITISSHVGLAFTGYGATLSALGLPFVWSPAFAFIIAFMTVMGMTIAFAKDISDIEGDAKYGVSTVATKLGARKMTLVVSGVLLLNYLVSISIGIIWPQVFKSNIMILSHAILAFALIFQTRDLALANYASVPSRQFFEFIWLLYYAEYFVYVFI

SEQ ID NO: 455 - DNA, 951 bp, synthetic construct
  source 1..951: mol_type = other DNA
attgaaggttcagggcatcatgaatcttggaactcaatcgcaactaaaattttgaactttggtcatacatgttggaaattgcaaagaccatacgttgttaagggtatgatttctattgctgcgggtttatttggtagagaattgctgaataacagacatttgttttcttggggtttgatggcgaaagcagggttcgcattagttccaatcttgtcttttaatttctttgctgcatgcatgaaccaaatatatgatgttgatattgatagaattaataagccagatttgccattggtttctggtgaaatgtcaatcgaaactgcttggattttatctatcatcgttgcattgactggtttgatcgttacaatttggttaaaatcagctccattgttcgtttttatatatatcttcggtatcttcgctggttttgcatactctgttccaccaattagatggaagcaataccctgcgactaatttcttgatcacaatttcttcacatgttggtttggcttttactgcgtacgcagctactgtctctgcattaggtttgccatttgtttggtcgccagcttttgcgtttattatcgcttttatgactgttatgggtatgacaatcgctttcgcaaaggatatctctgatattgaaggtgacgctaaatacggtgtttcaactgttgctacaaaattgggtgcaagaaagatgacttgggttgtttctggtgttttgttgttgaactatttggtttctatctcaatcggtattatttggccacaagtttttaaatctaacatcatgatcttgtcacatgctatcttggcattcgcgttgatcttccaaacaagacgcttagctttggcaaattatgcttctgtcccatcaagacaatttttcgagtttatttggttgttgtactacgctgaatattttgtttacgtttttatttga

SEQ ID NO: 456 - protein, 316 aa, synthetic construct
IEGSGHHESWNSIATKILNFGHTCWKLQRPYVVKGMISIAAGLFGRELLNNRHLFSWGLMAKAGFALVPILSFNFFAACMNQIYDVDIDRINKPDLPLVSGEMSIETAWILSIIVALTGLIVTIWLKSAPLFVFIYIFGIFAGFAYSVPPIRWKQYPATNFLITISSHVGLAFTAYAATVSALGLPFVWSPAFAFIIAFMTVMGMTIAFAKDISDIEGDAKYGVSTVATKLGARKMTWVVSGVLLLNYLVSISIGIIWPQVFKSNIMILSHAILAFALIFQTRRLALANYASVPSRQFFEFIWLLYYAEYFVYVFI

SEQ ID NO: 457 - DNA, 951 bp, synthetic construct
  source 1..951: mol_type = other DNA
attgaaggttcagtgcatcatgaatctctgaactcaatcgcaactaaaattttgaactttggtcatacatgttggaaattgcaaagaccatacgttgttaagggtatgatttctattgcttcgggtttatttggtagagaattgctgaataacagacatttgttttcttggggtttgatggcgaaagcaatgttcgcattagttccaatcttgtcttttaatttctttgctgcagcaatgaaccaaatatatgatgttgatattgatagaattaataagccagatttgccattggtttctggtgaaatgtcaatcgaaactgcttggattttatctatcatcgttgcattgactggtttgatcgttacaatttggttaaaatcagctccattgttcgtttttatatatatcttcggtatcttcgctggttttgcatactctgttccaccaattagatggaagcaataccctgcgactaatttcttgatcacaatttcttcacatgttggtttggcttttactgcgtacgcagctactctgtctgcattaggtttgccatttgtttggtcgccagcttttctgtttattatcgcttttatgactgttatgggtatgacaatcgctttcgcaaaggatatctctgatattgaaggtgacgctaaatacggtgtttcaactgttgctacaaaattgggtgcaagatgcatgactttggttgtttctggtgttttgttgttgaactatttggtttctatctcaatcggtattatttggccacaagtttttaaatctaacatcatgatcttgtcacatgctatcttggcattcgcgttgatcttccaaacaagagacttagctttggcaaattatgcttctggcccatcaagacaatttttcgagtttatttggttgttgtactacgctgaatattttgtttacgtttttatttga

SEQ ID NO: 458 - protein, 316 aa, synthetic construct
IEGSVHHESLNSIATKILNFGHTCWKLQRPYVVKGMISIASGLFGRELLNNRHLFSWGLMAKAMFALVPILSFNFFAAAMNQIYDVDIDRINKPDLPLVSGEMSIETAWILSIIVALTGLIVTIWLKSAPLFVFIYIFGIFAGFAYSVPPIRWKQYPATNFLITISSHVGLAFTAYAATLSALGLPFVWSPAFLFIIAFMTVMGMTIAFAKDISDIEGDAKYGVSTVATKLGARCMTLVVSGVLLLNYLVSISIGIIWPQVFKSNIMILSHAILAFALIFQTRDLALANYASGPSRQFFEFIWLLYYAEYFVYVFI

SEQ ID NO: 459 - DNA, 951 bp, synthetic construct
  source 1..951: mol_type = other DNA
attgaaggttcagggcatcatgaatctctgaactcaatcgcaactaaaattttgaactttggtcatacatgttggaaattgcaaagaccatacgttgttaagggtatgatttctattgctgcgggtttatttggtagagaattgctgaataacagacatttgttttcttggggtttgatggcgaaagcaatgttcgcattagttccaatcttgtcttttaatttctttgctgcatgcatgaaccaaatatatgatgttgatattgatagaattaataagccagatttgccattggtttctggtgaaatgtcaatcgaaactgcttggattttatctatcatcgttgcattgactggtttgatcgttacaattgtcttaaaatcagctccattgttcgtttttatatatatcttcggtatcttcgctggttttgcatactctgttccaccaattagatggaagcaataccctgcgactaatttcttgatcacaatttcttcacatgttggtttggcttttactgtgtacacggctactcgctctgcattaggtttgccatttgtttgggcgccagcttttgcgtttattatcgcttttatgactgttatgggtatgacaatcgctttcgcaaaggatatctctgatattgaaggtgacgctaaatacggtgtttcaactgttgctacaaaattgggtgcaagatgcatgacttgggttgtttctggtgttttgttgttgaactatttggtttctatctcaatcggtattatttggccacaagtttttaaatctaacatcatgatcttgtcacatgctatcttggcattcatgttgatcttccaaacaagaaagttagctttggcaaattatgcttctggcccatcaagacaatttttcgagtttatttggttgttgtactacgctgaatattttgtttacgtttttatttga

SEQ ID NO: 460 - protein, 316 aa, synthetic construct
IEGSGHHESLNSIATKILNFGHTCWKLQRPYVVKGMISIAAGLFGRELLNNRHLFSWGLMAKAMFALVPILSFNFFAACMNQIYDVDIDRINKPDLPLVSGEMSIETAWILSIIVALTGLIVTIVLKSAPLFVFIYIFGIFAGFAYSVPPIRWKQYPATNFLITISSHVGLAFTVYTATRSALGLPFVWAPAFAFIIAFMTVMGMTIAFAKDISDIEGDAKYGVSTVATKLGARCMTWVVSGVLLLNYLVSISIGIIWPQVFKSNIMILSHAILAFMLIFQTRKLALANYASGPSRQFFEFIWLLYYAEYFVYVFI

SEQ ID NO: 461 - DNA, 951 bp, synthetic construct
  source 1..951: mol_type = other DNA
attgaaggttcagggcatcatgaatctgtgaactcaatcgcaactaaaattttgaactttggtcatacatgttggaaattgcaaagaccatacgttgttaagggtatgatttctattgcttcgggtttatttggtagagaattgctgaataacagacatttgttttcttggggtttgatggcgaaagcaacgttcgcattagttccaatcttgtcttttaatttctttgctgcatgcatgaaccaaatatatgatgttgatattgatagaattaataagccagatttgccattggtttctggtgaaatgtcaatcgaaactgcttggattttatctatcatcgttgcattgactggtttgatcgttacaattatgttaaaatcagctccattgttcgtttttatatatatcttcggtatcttcgctggttttgcatactctgttccaccaattagatggaagcaataccctgcgactaatttcttgatcacaatttcttcacatgttggtttggcttttactacgtacacggctactctgtctgcattaggtttgccatttgtttggcagccagcttttctgtttattatcgcttttatgactgttatgggtatgacaatcgctttcgcaaaggatatctctgatattgaaggtgacgctaaatacggtgtttcaactgttgctacaaaattgggtgcaagatgcatgactttggttgtttctggtgttttgttgttgaactatttggtttctatctcaatcggtattatttggccacaagtttttaaatctaacatcatgatcttgtcacatgctatcttggcattcgcgttgatcttccaaacaagagacttagctttggcaaattatgcttctggcccatcaagacaatttttcgagtttatttggttgttgtactacgctgaatattttgtttacgtttttatttga

SEQ ID NO: 462 - protein, 316 aa, synthetic construct
IEGSGHHESVNSIATKILNFGHTCWKLQRPYVVKGMISIASGLFGRELLNNRHLFSWGLMAKATFALVPILSFNFFAACMNQIYDVDIDRINKPDLPLVSGEMSIETAWILSIIVALTGLIVTIMLKSAPLFVFIYIFGIFAGFAYSVPPIRWKQYPATNFLITISSHVGLAFTTYTATLSALGLPFVWQPAFLFIIAFMTVMGMTIAFAKDISDIEGDAKYGVSTVATKLGARCMTLVVSGVLLLNYLVSISIGIIWPQVFKSNIMILSHAILAFALIFQTRDLALANYASGPSRQFFEFIWLLYYAEYFVYVFI

SEQ ID NO: 463 - DNA, 951 bp, synthetic construct
  source 1..951: mol_type = other DNA
attgaaggttcaccacatcatgaatctgataactcaatcgcaactaaaattttgaactttggtcatacatgttggaaattgcaaagaccatacgttgttaagggtatgatttctattgcttgtggtttatttggtagagaattgtttaataacagacatttgttttcttggggtttgatgtggaaagcatttttcgcattagttccaatcttgtcttttaatttctttgctgcaatcatgaaccaaatatatgatgttgatattgatagaattaataagccagatttgccattggtttctggtgaaatgtcaatcgaaactgcttggattttatctatcatcgttgcattgactggtttgatcgttacaatttggttaaaatcagctccattgttcgtttttatatatatcttcggtatcttcgctggttttgcatactctgttccaccaattagatggaagcaataccctgcgactaatttcttgatcacaatttcttcacatgttggtttggcttttactgcgtacacggctactctgtctgcattaggtttgccatttgtttggcagccagcttttgcgtttattatcgcttttatgactgttatgggtatgacaatcgctttcgcaaaggatatctctgatattgaaggtgacgctaaatacggtgtttcaactgttgctacaaaattgggtgcaagatgcatgactttggttgtttctggtgttttgttgttgaactatttggtttctatctcaatcggtattatttggccacaagtttttaaatctaacatcatgatcttgtcacatgctatcttggcattcgcgttgatcttccaaacaagagacttagctttggcaaattatgcttctgtcccatcaagacaatttttcgagtttatttggttgttgtactacgctgaatattttgtttacgtttttatttga

SEQ ID NO: 464 - protein, 316 aa, synthetic construct
IEGSPHHESDNSIATKILNFGHTCWKLQRPYVVKGMISIACGLFGRELFNNRHLFSWGLMWKAFFALVPILSFNFFAAIMNQIYDVDIDRINKPDLPLVSGEMSIETAWILSIIVALTGLIVTIWLKSAPLFVFIYIFGIFAGFAYSVPPIRWKQYPATNFLITISSHVGLAFTAYTATLSALGLPFVWQPAFAFIIAFMTVMGMTIAFAKDISDIEGDAKYGVSTVATKLGARCMTLVVSGVLLLNYLVSISIGIIWPQVFKSNIMILSHAILAFALIFQTRDLALANYASVPSRQFFEFIWLLYYAEYFVYVFI

SEQ ID NO: 465 - DNA, 951 bp, synthetic construct
  source 1..951: mol_type = other DNA
attgaaggttcagggcatcatgaatctgtgaactcaatcgcaactaaaattttgaactttggtcatacatgttggaaattgcaaagaccatacgttgttaagggtatgatttctattgctgcgggtttatttggtagagaattgctgaataacagacatttgttttcttggggtttgatggtgaaagcactgttcgcattagttccaatcttgtcttttaatttctttgctgcagcaatgaaccaaatatatgatgttgatattgatagaattaataagccagatttgccattggtttctggtgaaatgtcaatcgaaactgcttggattttatctatcatcgttgcattgactggtttgatcgttacaattatgttaaaatcagctccattgttcgtttttatatatatcttcggtatcttcgctggttttgcatactctgttccaccaattagatggaagcaataccctgcgactaatttcttgatcacaatttcttcacatgttggtttggcttttactgggtacggcgctactctgtctgcattaggtttgccatttgtttggggcccagcttttgtctttattatcgcttttatgactgttatgggtatgacaatcgctttcgcaaaggatatctctgatattgaaggtgacgctaaatacggtgtttcaactgttgctacaaaattgggtgcaagaaagatgactttggttgtttctggtgttttgttgttgaactatttggtttctatctcaatcggtattatttggccacaagtttttaaatctaacatcatgatcttgtcacatgctatcttggcattcgcgttgatcttccaaacaagacgcttagctttggcaaattatgcttctaagccatcaagacaatttttcgagtttatttggttgttgtactacgctgaatattttgtttacgtttttatttga

SEQ ID NO: 466 - protein, 316 aa, synthetic construct
IEGSGHHESVNSIATKILNFGHTCWKLQRPYVVKGMISIAAGLFGRELLNNRHLFSWGLMVKALFALVPILSFNFFAAAMNQIYDVDIDRINKPDLPLVSGEMSIETAWILSIIVALTGLIVTIMLKSAPLFVFIYIFGIFAGFAYSVPPIRWKQYPATNFLITISSHVGLAFTGYGATLSALGLPFVWGPAFVFIIAFMTVMGMTIAFAKDISDIEGDAKYGVSTVATKLGARKMTLVVSGVLLLNYLVSISIGIIWPQVFKSNIMILSHAILAFALIFQTRRLALANYASKPSRQFFEFIWLLYYAEYFVYVFI

SEQ ID NO: 467 - DNA, 951 bp, synthetic construct
  source 1..951: mol_type = other DNA
attgaaggttcagtgcatcatgaatctctgaactcaatcgcaactaaaattttgaactttggtcatacatgttggaaattgcaaagaccatacgttgttaagggtatgatttctattgctggcggtttatttggtagagaattgctgaataacagacatttgttttcttggggtttgatggtgaaagcaacgttcgcattagttccaatcttgtcttttaatttctttgctgcatgcatgaaccaaatatatgatgttgatattgatagaattaataagccagatttgccattggtttctggtgaaatgtcaatcgaaactgcttggattttatctatcatcgttgcattgactggtttgatcgttacaattgtcttaaaatcagctccattgttcgtttttatatatatcttcggtatcttcgctggttttgcatactctgttccaccaattagatggaagcaataccctgggactaatttcttgatcacaatttcttcacatgttggtttggcttttactgggtacacggctactcgctctgcattaggtttgccatttgtttggtcgccagcttttctgtttattatcgcttttatgactgttatgggtatgacaatcgctttcgcaaaggatatctctgatattgaaggtgacgctaaatacggtgtttcaactgttgctacaaaattgggtgcaagatgcatgactttggttgtttctggtgttttgttgttgaactatttggtttctatctcaatcggtattatttggccacaagtttttaaatctaacatcatgatcttgtcacatgctatcttggcattcatgttgatcttccaaacaagacgcttagctttggcaaattatgcttctggcccatcaagacaatttttcgagtttatttggttgttgtactacgctgaatattttgtttacgtttttatttga

SEQ ID NO: 468 - protein, 316 aa, synthetic construct
IEGSVHHESLNSIATKILNFGHTCWKLQRPYVVKGMISIAGGLFGRELLNNRHLFSWGLMVKATFALVPILSFNFFAACMNQIYDVDIDRINKPDLPLVSGEMSIETAWILSIIVALTGLIVTIVLKSAPLFVFIYIFGIFAGFAYSVPPIRWKQYPGTNFLITISSHVGLAFTGYTATRSALGLPFVWSPAFLFIIAFMTVMGMTIAFAKDISDIEGDAKYGVSTVATKLGARCMTLVVSGVLLLNYLVSISIGIIWPQVFKSNIMILSHAILAFMLIFQTRRLALANYASGPSRQFFEFIWLLYYAEYFVYVFI

SEQ ID NO: 469 - DNA, 951 bp, synthetic construct
  source 1..951: mol_type = other DNA
attgaaggttcagtgcatcatgaatctgtgaactcaatcgcaactaaaattttgaactttggtcatacatgttggaaattgcaaagaccatacgttgttaagggtatgatttctattgcttcgggtttatttggtagagaattgatgaataacagacatttgttttcttggggtttgatggcgaaagcaatgttcgcattagttccaatcttgtcttttaatttctttgctgcagcaatgaaccaaatatatgatgttgatattgatagaattaataagccagatttgccattggtttctggtgaaatgtcaatcgaaactgcttggattttatctatcatcgttgcattgactggtttgatcgttacaatttggttaaaatcagctccattgttcgtttttatatatatcttcggtatcttcgctggttttgcatactctgttccaccaattagatggaagcaataccctgcgactaatttcttgatcacaatttcttcacatgttggtttggcttttactgcgtacggcgctactctgtctgcattaggtttgccatttgtttggggcccagcttttgcgtttattatcgcttttatgactgttatgggtatgacaatcgctttcgcaaaggatatctctgatattgaaggtgacgctaaatacggtgtttcaactgttgctacaaaattgggtgcaagatgcatgactttggttgtttctggtgttttgttgttgaactatttggtttctatctcaatcggtattatttggccacaagtttttaaatctaacatcatgatcttgtcacatgctatcttggcattcgcgttgatcttccaaacaagagacttagctttggcaaattatgcttctgtcccatcaagacaatttttcgagtttatttggttgttgtactacgctgaatattttgtttacgtttttatttga

SEQ ID NO: 470 - protein, 316 aa, synthetic construct
IEGSVHHESVNSIATKILNFGHTCWKLQRPYVVKGMISIASGLFGRELMNNRHLFSWGLMAKAMFALVPILSFNFFAAAMNQIYDVDIDRINKPDLPLVSGEMSIETAWILSIIVALTGLIVTIWLKSAPLFVFIYIFGIFAGFAYSVPPIRWKQYPATNFLITISSHVGLAFTAYGATLSALGLPFVWGPAFAFIIAFMTVMGMTIAFAKDISDIEGDAKYGVSTVATKLGARCMTLVVSGVLLLNYLVSISIGIIWPQVFKSNIMILSHAILAFALIFQTRDLALANYASVPSRQFFEFIWLLYYAEYFVYVFI

SEQ ID NO: 471 - DNA, 951 bp, synthetic construct
  source 1..951: mol_type = other DNA
attgaaggttcagggcatcatgaatcttggaactcaatcgcaactaaaattttgaactttggtcatacatgttggaaattgcaaagaccatacgttgttaagggtatgatttctattgcttcgggtttatttggtagagaattgatgaataacagacatttgttttcttggggtttgatggcgaaagcatggttcgcattagttccaatcttgtcttttaatttctttgctgcatgcatgaaccaaatatatgatgttgatattgatagaattaataagccagatttgccattggtttctggtgaaatgtcaatcgaaactgcttggattttatctatcatcgttgcattgactggtttgatcgttacaatttggttaaaatcagctccattgttcgtttttatatatatcttcggtatcttcgctggttttgcatactctgttccaccaattagatggaagcaataccctgcgactaatttcttgatcacaatttcttcacatgttggtttggcttttactgcgtacgcagctactcgctctgcattaggtttgccatttgtttggtcgccagcttttgcgtttattatcgcttttatgactgttatgggtatgacaatcgctttcgcaaaggatatctctgatattgaaggtgacgctaaatacggtgtttcaactgttgctacaaaattgggtgcaagatgcatgacttgggttgtttctggtgttttgttgttgaactatttggtttctatctcaatcggtattatttggccacaagtttttaaatctaacatcatgatcttgtcacatgctatcttggcattcatgttgatcttccaaacaagagacttagctttggcaaattatgcttctggcccatcaagacaatttttcgagtttatttggttgttgtactacgctgaatattttgtttacgtttttatttga

SEQ ID NO: 472 - protein, 316 aa, synthetic construct
IEGSGHHESWNSIATKILNFGHTCWKLQRPYVVKGMISIASGLFGRELMNNRHLFSWGLMAKAWFALVPILSFNFFAACMNQIYDVDIDRINKPDLPLVSGEMSIETAWILSIIVALTGLIVTIWLKSAPLFVFIYIFGIFAGFAYSVPPIRWKQYPATNFLITISSHVGLAFTAYAATRSALGLPFVWSPAFAFIIAFMTVMGMTIAFAKDISDIEGDAKYGVSTVATKLGARCMTWVVSGVLLLNYLVSISIGIIWPQVFKSNIMILSHAILAFMLIFQTRDLALANYASGPSRQFFEFIWLLYYAEYFVYVFI

SEQ ID NO: 473 - DNA, 951 bp, synthetic construct
  source 1..951: mol_type = other DNA
attgaaggttcagtgcatcatgaatctgtgaactcaatcgcaactaaaattttgaactttggtcatacatgttggaaattgcaaagaccatacgttgttaagggtatgatttctattgctggcggtttatttggtagagaattgctgaataacagacatttgttttcttggggtttgatggtgaaagcaatgttcgcattagttccaatcttgtcttttaatttctttgctgcatgcatgaaccaaatatatgatgttgatattgatagaattaataagccagatttgccattggtttctggtgaaatgtcaatcgaaactgcttggattttatctatcatcgttgcattgactggtttgatcgttacaattgtcttaaaatcagctccattgttcgtttttatatatatcttcggtatcttcgctggttttgcatactctgttccaccaattagatggaagcaataccctgcgactaatttcttgatcacaatttcttcacatgttggtttggcttttactgggtacacggctactctgtctgcattaggtttgccatttgtttggcagccagcttttgcgtttattatcgcttttatgactgttatgggtatgacaatcgctttcgcaaaggatatctctgatattgaaggtgacgctaaatacggtgtttcaactgttgctacaaaattgggtgcaagagtcatgactttggttgtttctggtgttttgttgttgaactatttggtttctatctcaatcggtattatttggccacaagtttttaaatctaacatcatgatcttgtcacatgctatcttggcattcatgttgatcttccaaacaagacgcttagctttggcaaattatgcttctggcccatcaagacaatttttcgagtttatttggttgttgtactacgctgaatattttgtttacgtttttatttga

SEQ ID NO: 474 - protein, 316 aa, synthetic construct
IEGSVHHESVNSIATKILNFGHTCWKLQRPYVVKGMISIAGGLFGRELLNNRHLFSWGLMVKAMFALVPILSFNFFAACMNQIYDVDIDRINKPDLPLVSGEMSIETAWILSIIVALTGLIVTIVLKSAPLFVFIYIFGIFAGFAYSVPPIRWKQYPATNFLITISSHVGLAFTGYTATLSALGLPFVWQPAFAFIIAFMTVMGMTIAFAKDISDIEGDAKYGVSTVATKLGARVMTLVVSGVLLLNYLVSISIGIIWPQVFKSNIMILSHAILAFMLIFQTRRLALANYASGPSRQFFEFIWLLYYAEYFVYVFI

SEQ ID NO: 475 - DNA, 951 bp, synthetic construct
  source 1..951: mol_type = other DNA
attgaaggttcagtgcatcatgaatctctgaactcaatcgcaactaaaattttgaactttggtcatacatgttggaaattgcaaagaccatacgttgttaagggtatgatttctattgcttcgggtttatttggtagagaattgctgaataacagacatttgttttcttggggtttgatggcgaaagcaacgttcgcattagttccaatcttgtcttttaatttctttgctgcatgcatgaaccaaatatatgatgttgatattgatagaattaataagccagatttgccattggtttctggtgaaatgtcaatcgaaactgcttggattttatctatcatcgttgcattgactggtttgatcgttacaattatgttaaaatcagctccattgttcgtttttatatatatcttcggtatcttcgctggttttgcatactctgttccaccaattagatggaagcaataccctgggactaatttcttgatcacaatttcttcacatgttggtttggcttttactgggtacgcagctactctgtctgcattaggtttgccatttgtttgggcgccagcttttgcgtttattatcgcttttatgactgttatgggtatgacaatcgctttcgcaaaggatatctctgatattgaaggtgacgctaaatacggtgtttcaactgttgctacaaaattgggtgcaagatgcatgactttggttgtttctggtgttttgttgttgaactatttggtttctatctcaatcggtattatttggccacaagtttttaaatctaacatcatgatcttgtcacatgctatcttggcattcatgttgatcttccaaacaagaaagttagctttggcaaattatgcttctggcccatcaagacaatttttcgagtttatttggttgttgtactacgctgaatattttgtttacgtttttatttga

SEQ ID NO: 476 - protein, 316 aa, synthetic construct
IEGSVHHESLNSIATKILNFGHTCWKLQRPYVVKGMISIASGLFGRELLNNRHLFSWGLMAKATFALVPILSFNFFAACMNQIYDVDIDRINKPDLPLVSGEMSIETAWILSIIVALTGLIVTIMLKSAPLFVFIYIFGIFAGFAYSVPPIRWKQYPGTNFLITISSHVGLAFTGYAATLSALGLPFVWAPAFAFIIAFMTVMGMTIAFAKDISDIEGDAKYGVSTVATKLGARCMTLVVSGVLLLNYLVSISIGIIWPQVFKSNIMILSHAILAFMLIFQTRKLALANYASGPSRQFFEFIWLLYYAEYFVYVFI

SEQ ID NO: 477 - DNA, 951 bp, synthetic construct
  source 1..951: mol_type = other DNA
attgaaggttcagggcatcatgaatctgtgaactcaatcgcaactaaaattttgaactttggtcatacatgttggaaattgcaaagaccatacgttgttaagggtatgatttctattgctgcgggtttatttggtagagaattgctgaataacagacatttgttttcttggggtttgatggcgaaagcagggttcgcattagttccaatcttgtcttttaatttctttgctgcatgcatgaaccaaatatatgatgttgatattgatagaattaataagccagatttgccattggtttctggtgaaatgtcaatcgaaactgcttggattttatctatcatcgttgcattgactggtttgatcgttacaatttggttaaaatcagctccattgttcgtttttatatatatcttcggtatcttcgctggttttgcatactctgttccaccaattagatggaagcaataccctgcgactaatttcttgatcacaatttcttcacatgttggtttggcttttactgcgtacacggctactcgctctgcattaggtttgccatttgtttggtcgccagcttttgtctttattatcgcttttatgactgttatgggtatgacaatcgctttcgcaaaggatatctctgatattgaaggtgacgctaaatacggtgtttcaactgttgctacaaaattgggtgcaagatgcatgacttgggttgtttctggtgttttgttgttgaactatttggtttctatctcaatcggtattatttggccacaagtttttaaatctaacatcatgatcttgtcacatgctatcttggcattcgcgttgatcttccaaacaagagacttagctttggcaaattatgcttctggcccatcaagacaatttttcgagtttatttggttgttgtactacgctgaatattttgtttacgtttttatttga

SEQ ID NO: 478 - protein, 316 aa, synthetic construct
IEGSGHHESVNSIATKILNFGHTCWKLQRPYVVKGMISIAAGLFGRELLNNRHLFSWGLMAKAGFALVPILSFNFFAACMNQIYDVDIDRINKPDLPLVSGEMSIETAWILSIIVALTGLIVTIWLKSAPLFVFIYIFGIFAGFAYSVPPIRWKQYPATNFLITISSHVGLAFTAYTATRSALGLPFVWSPAFVFIIAFMTVMGMTIAFAKDISDIEGDAKYGVSTVATKLGARCMTWVVSGVLLLNYLVSISIGIIWPQVFKSNIMILSHAILAFALIFQTRDLALANYASGPSRQFFEFIWLLYYAEYFVYVFI

SEQ ID NO: 479 - DNA, 951 bp, synthetic construct
  source 1..951: mol_type = other DNA
attgaaggttcagggcatcatgaatcttggaactcaatcgcaactaaaattttgaactttggtcatacatgttggaaattgcaaagaccatacgttgttaagggtatgatttctattgctggcggtttatttggtagagaattgcgcaataacagacatttgttttcttggggtttgatggcgaaagcactgttcgcattagttccaatcttgtcttttaatttctttgctgcatgcatgaaccaaatatatgatgttgatattgatagaattaataagccagatttgccattggtttctggtgaaatgtcaatcgaaactgcttggattttatctatcatcgttgcattgactggtttgatcgttacaattatgttaaaatcagctccattgttcgtttttatatatatcttcggtatcttcgctggttttgcatactctgttccaccaattagatggaagcaataccctgcgactaatttcttgatcacaatttcttcacatgttggtttggcttttactgcgtacgcagctactctgtctgcattaggtttgccatttgtttgggcgccagcttttgtctttattatcgcttttatgactgttatgggtatgacaatcgctttcgcaaaggatatctctgatattgaaggtgacgctaaatacggtgtttcaactgttgctacaaaattgggtgcaagatgcatgacttgggttgtttctggtgttttgttgttgaactatttggtttctatctcaatcggtattatttggccacaagtttttaaatctaacatcatgatcttgtcacatgctatcttggcattcatgttgatcttccaaacaagagacttagctttggcaaattatgcttctgtcccatcaagacaatttttcgagtttatttggttgttgtactacgctgaatattttgtttacgtttttatttga

SEQ ID NO: 480 - protein, 316 aa, synthetic construct
IEGSGHHESWNSIATKILNFGHTCWKLQRPYVVKGMISIAGGLFGRELRNNRHLFSWGLMAKALFALVPILSFNFFAACMNQIYDVDIDRINKPDLPLVSGEMSIETAWILSIIVALTGLIVTIMLKSAPLFVFIYIFGIFAGFAYSVPPIRWKQYPATNFLITISSHVGLAFTAYAATLSALGLPFVWAPAFVFIIAFMTVMGMTIAFAKDISDIEGDAKYGVSTVATKLGARCMTWVVSGVLLLNYLVSISIGIIWPQVFKSNIMILSHAILAFMLIFQTRDLALANYASVPSRQFFEFIWLLYYAEYFVYVFI

SEQ ID NO: 481 - DNA, 951 bp, synthetic construct
  source 1..951: mol_type = other DNA
attgaaggttcaccacatcatgaatctgataactcaatcgcaactaaaattttgaactttggtcatacatgttggaaattgcaaagaccatacgttgttaagggtatgatttctattgctgcgggtttatttggtagagaattgctgaataacagacatttgttttcttggggtttgatggtgaaagcactgttcgcattagttccaatcttgtcttttaatttctttgctgcagcaatgaaccaaatatatgatgttgatattgatagaattaataagccagatttgccattggtttctggtgaaatgtcaatcgaaactgcttggattttatctatcatcgttgcattgactggtttgatcgttacaattgtcttaaaatcagctccattgttcgtttttatatatatcttcggtatcttcgctggttttgcatactctgttccaccaattagatggaagcaataccctgggactaatttcttgatcacaatttcttcacatgttggtttggcttttactgggtacggcgctactctgtctgcattaggtttgccatttgtttggggcccagcttttgcgtttattatcgcttttatgactgttatgggtatgacaatcgctttcgcaaaggatatctctgatattgaaggtgacgctaaatacggtgtttcaactgttgctacaaaattgggtgcaagagtcatgacttgggttgtttctggtgttttgttgttgaactatttggtttctatctcaatcggtattatttggccacaagtttttaaatctaacatcatgatcttgtcacatgctatcttggcattcgcgttgatcttccaaacaagagacttagctttggcaaattatgcttctggcccatcaagacaatttttcgagtttatttggttgttgtactacgctgaatattttgtttacgtttttatttga

SEQ ID NO: 482 - protein, 316 aa, synthetic construct
IEGSPHHESDNSIATKILNFGHTCWKLQRPYVVKGMISIAAGLFGRELLNNRHLFSWGLMVKALFALVPILSFNFFAAAMNQIYDVDIDRINKPDLPLVSGEMSIETAWILSIIVALTGLIVTIVLKSAPLFVFIYIFGIFAGFAYSVPPIRWKQYPGTNFLITISSHVGLAFTGYGATLSALGLPFVWGPAFAFIIAFMTVMGMTIAFAKDISDIEGDAKYGVSTVATKLGARVMTWVVSGVLLLNYLVSISIGIIWPQVFKSNIMILSHAILAFALIFQTRDLALANYASGPSRQFFEFIWLLYYAEYFVYVFI

SEQ ID NO: 483 - DNA, 951 bp, synthetic construct
  source 1..951: mol_type = other DNA
attgaaggttcaccacatcatgaatctgataactcaatcgcaactaaaattttgaactttggtcatacatgttggaaattgcaaagaccatacgttgttaagggtatgatttctattgcttgtggtttatttggtagagaattgtttaataacagacatttgttttcttggggtttgatgtggaaagcatttttcgcattagttccaatcttgtcttttaatttctttgctgcaatcatgaaccaaatatatgatgttgatattgatagaattaataagccagatttgccattggtttctggtgaaatgtcaatcgaaactgcttggattttatctatcatcgttgcattgactggtttgatcgttacaatttggttaaaatcagctccattgttcgtttttatatatatcttcggtatcttcgctggttttgcatactctgttccaccaattagatggaagcaataccctgcgactaatttcttgatcacaatttcttcacatgttggtttggcttttactgcgtacggcgctactgtctctgcattaggtttgccatttgtttggtcgccagcttttctgtttattatcgcttttatgactgttatgggtatgacaatcgctttcgcaaaggatatctctgatattgaaggtgacgctaaatacggtgtttcaactgttgctacaaaattgggtgcaagaaagatgacttgggttgtttctggtgttttgttgttgaactatttggtttctatctcaatcggtattatttggccacaagtttttaaatctaacatcatgatcttgtcacatgctatcttggcattcatgttgatcttccaaacaagacgcttagctttggcaaattatgcttctggcccatcaagacaatttttcgagtttatttggttgttgtactacgctgaatattttgtttacgtttttatttga

SEQ ID NO: 484 - protein, 316 aa, synthetic construct
IEGSPHHESDNSIATKILNFGHTCWKLQRPYVVKGMISIACGLFGRELFNNRHLFSWGLMWKAFFALVPILSFNFFAAIMNQIYDVDIDRINKPDLPLVSGEMSIETAWILSIIVALTGLIVTIWLKSAPLFVFIYIFGIFAGFAYSVPPIRWKQYPATNFLITISSHVGLAFTAYGATVSALGLPFVWSPAFLFIIAFMTVMGMTIAFAKDISDIEGDAKYGVSTVATKLGARKMTWVVSGVLLLNYLVSISIGIIWPQVFKSNIMILSHAILAFMLIFQTRRLALANYASGPSRQFFEFIWLLYYAEYFVYVFI

SEQ ID NO: 485 - DNA, 951 bp, synthetic construct
  source 1..951: mol_type = other DNA
attgaaggttcagtgcatcatgaatctgtgaactcaatcgcaactaaaattttgaactttggtcatacatgttggaaattgcaaagaccatacgttgttaagggtatgatttctattgcttcgggtttatttggtagagaattgatgaataacagacatttgttttcttggggtttgatggcgaaagcaatgttcgcattagttccaatcttgtcttttaatttctttgctgcatgcatgaaccaaatatatgatgttgatattgatagaattaataagccagatttgccattggtttctggtgaaatgtcaatcgaaactgcttggattttatctatcatcgttgcattgactggtttgatcgttacaattatgttaaaatcagctccattgttcgtttttatatatatcttcggtatcttcgctggttttgcatactctgttccaccaattagatggaagcaataccctgcgactaatttcttgatcacaatttcttcacatgttggtttggcttttactgggtacacggctactcgctctgcattaggtttgccatttgtttggtcgccagcttttgcgtttattatcgcttttatgactgttatgggtatgacaatcgctttcgcaaaggatatctctgatattgaaggtgacgctaaatacggtgtttcaactgttgctacaaaattgggtgcaagagtcatgacttgggttgtttctggtgttttgttgttgaactatttggtttctatctcaatcggtattatttggccacaagtttttaaatctaacatcatgatcttgtcacatgctatcttggcattcgcgttgatcttccaaacaagacgcttagctttggcaaattatgcttctggcccatcaagacaatttttcgagtttatttggttgttgtactacgctgaatattttgtttacgtttttatttga

SEQ ID NO: 486 - protein, 316 aa, synthetic construct
IEGSVHHESVNSIATKILNFGHTCWKLQRPYVVKGMISIASGLFGRELMNNRHLFSWGLMAKAMFALVPILSFNFFAACMNQIYDVDIDRINKPDLPLVSGEMSIETAWILSIIVALTGLIVTIMLKSAPLFVFIYIFGIFAGFAYSVPPIRWKQYPATNFLITISSHVGLAFTGYTATRSALGLPFVWSPAFAFIIAFMTVMGMTIAFAKDISDIEGDAKYGVSTVATKLGARVMTWVVSGVLLLNYLVSISIGIIWPQVFKSNIMILSHAILAFALIFQTRRLALANYASGPSRQFFEFIWLLYYAEYFVYVFI

SEQ ID NO: 487 - DNA, 951 bp, synthetic construct
  source 1..951: mol_type = other DNA
attgaaggttcagggcatcatgaatcttggaactcaatcgcaactaaaattttgaactttggtcatacatgttggaaattgcaaagaccatacgttgttaagggtatgatttctattgctgcgggtttatttggtagagaattgctgaataacagacatttgttttcttggggtttgatggcgaaagcactgttcgcattagttccaatcttgtcttttaatttctttgctgcatgcatgaaccaaatatatgatgttgatattgatagaattaataagccagatttgccattggtttctggtgaaatgtcaatcgaaactgcttggattttatctatcatcgttgcattgactggtttgatcgttacaatttggttaaaatcagctccattgttcgtttttatatatatcttcggtatcttcgctggttttgcatactctgttccaccaattagatggaagcaataccctgcgactaatttcttgatcacaatttcttcacatgttggtttggcttttactgcgtacggcgctactgtctctgcattaggtttgccatttgtttgggcgccagcttttgcgtttattatcgcttttatgactgttatgggtatgacaatcgctttcgcaaaggatatctctgatattgaaggtgacgctaaatacggtgtttcaactgttgctacaaaattgggtgcaagatgcatgacttgggttgtttctggtgttttgttgttgaactatttggtttctatctcaatcggtattatttggccacaagtttttaaatctaacatcatgatcttgtcacatgctatcttggcattcgcgttgatcttccaaacaagagacttagctttggcaaattatgcttctggcccatcaagacaatttttcgagtttatttggttgttgtactacgctgaatattttgtttacgtttttatttga

SEQ ID NO: 488 - protein, 316 aa, synthetic construct
IEGSGHHESWNSIATKILNFGHTCWKLQRPYVVKGMISIAAGLFGRELLNNRHLFSWGLMAKALFALVPILSFNFFAACMNQIYDVDIDRINKPDLPLVSGEMSIETAWILSIIVALTGLIVTIWLKSAPLFVFIYIFGIFAGFAYSVPPIRWKQYPATNFLITISSHVGLAFTAYGATVSALGLPFVWAPAFAFIIAFMTVMGMTIAFAKDISDIEGDAKYGVSTVATKLGARCMTWVVSGVLLLNYLVSISIGIIWPQVFKSNIMILSHAILAFALIFQTRDLALANYASGPSRQFFEFIWLLYYAEYFVYVFI

SEQ ID NO: 489 - DNA, 951 bp, synthetic construct
  source 1..951: mol_type = other DNA
attgaaggttcagggcatcatgaatcttggaactcaatcgcaactaaaattttgaactttggtcatacatgttggaaattgcaaagaccatacgttgttaagggtatgatttctattgcttcgggtttatttggtagagaattgctgaataacagacatttgttttcttggggtttgatggcgaaagcatggttcgcattagttccaatcttgtcttttaatttctttgctgcagcaatgaaccaaatatatgatgttgatattgatagaattaataagccagatttgccattggtttctggtgaaatgtcaatcgaaactgcttggattttatctatcatcgttgcattgactggtttgatcgttacaattgtcttaaaatcagctccattgttcgtttttatatatatcttcggtatcttcgctggttttgcatactctgttccaccaattagatggaagcaataccctgcgactaatttcttgatcacaatttcttcacatgttggtttggcttttactacgtacggcgctactgtctctgcattaggtttgccatttgtttgggcgccagcttttctgtttattatcgcttttatgactgttatgggtatgacaatcgctttcgcaaaggatatctctgatattgaaggtgacgctaaatacggtgtttcaactgttgctacaaaattgggtgcaagagtcatgactttggttgtttctggtgttttgttgttgaactatttggtttctatctcaatcggtattatttggccacaagtttttaaatctaacatcatgatcttgtcacatgctatcttggcattcatgttgatcttccaaacaagagacttagctttggcaaattatgcttctgtcccatcaagacaatttttcgagtttatttggttgttgtactacgctgaatattttgtttacgtttttatttga

SEQ ID NO: 490 - protein, 316 aa, synthetic construct
IEGSGHHESWNSIATKILNFGHTCWKLQRPYVVKGMISIASGLFGRELLNNRHLFSWGLMAKAWFALVPILSFNFFAAAMNQIYDVDIDRINKPDLPLVSGEMSIETAWILSIIVALTGLIVTIVLKSAPLFVFIYIFGIFAGFAYSVPPIRWKQYPATNFLITISSHVGLAFTTYGATVSALGLPFVWAPAFLFIIAFMTVMGMTIAFAKDISDIEGDAKYGVSTVATKLGARVMTLVVSGVLLLNYLVSISIGIIWPQVFKSNIMILSHAILAFMLIFQTRDLALANYASVPSRQFFEFIWLLYYAEYFVYVFI

SEQ ID NO: 491 - DNA, 951 bp, synthetic construct
  source 1..951: mol_type = other DNA
attgaaggttcagtgcatcatgaatcttggaactcaatcgcaactaaaattttgaactttggtcatacatgttggaaattgcaaagaccatacgttgttaagggtatgatttctattgctggcggtttatttggtagagaattgctgaataacagacatttgttttcttggggtttgatggcgaaagcagggttcgcattagttccaatcttgtcttttaatttctttgctgcagcaatgaaccaaatatatgatgttgatattgatagaattaataagccagatttgccattggtttctggtgaaatgtcaatcgaaactgcttggattttatctatcatcgttgcattgactggtttgatcgttacaattatgttaaaatcagctccattgttcgtttttatatatatcttcggtatcttcgctggttttgcatactctgttccaccaattagatggaagcaataccctgcgactaatttcttgatcacaatttcttcacatgttggtttggcttttactgggtacgcagctactctgtctgcattaggtttgccatttgtttggtcgccagcttttgtctttattatcgcttttatgactgttatgggtatgacaatcgctttcgcaaaggatatctctgatattgaaggtgacgctaaatacggtgtttcaactgttgctacaaaattgggtgcaagagtcatgactttggttgtttctggtgttttgttgttgaactatttggtttctatctcaatcggtattatttggccacaagtttttaaatctaacatcatgatcttgtcacatgctatcttggcattcgcgttgatcttccaaacaagagacttagctttggcaaattatgcttctaagccatcaagacaatttttcgagtttatttggttgttgtactacgctgaatattttgtttacgtttttatttga

SEQ ID NO: 492 - protein, 316 aa, synthetic construct
IEGSVHHESWNSIATKILNFGHTCWKLQRPYVVKGMISIAGGLFGRELLNNRHLFSWGLMAKAGFALVPILSFNFFAAAMNQIYDVDIDRINKPDLPLVSGEMSIETAWILSIIVALTGLIVTIMLKSAPLFVFIYIFGIFAGFAYSVPPIRWKQYPATNFLITISSHVGLAFTGYAATLSALGLPFVWSPAFVFIIAFMTVMGMTIAFAKDISDIEGDAKYGVSTVATKLGARVMTLVVSGVLLLNYLVSISIGIIWPQVFKSNIMILSHAILAFALIFQTRDLALANYASKPSRQFFEFIWLLYYAEYFVYVFI

SEQ ID NO: 493 - DNA, 951 bp, synthetic construct
  source 1..951: mol_type = other DNA
attgaaggttcagggcatcatgaatctctgaactcaatcgcaactaaaattttgaactttggtcatacatgttggaaattgcaaagaccatacgttgttaagggtatgatttctattgctgcgggtttatttggtagagaattgctgaataacagacatttgttttcttggggtttgatggcgaaagcatggttcgcattagttccaatcttgtcttttaatttctttgctgcatgcatgaaccaaatatatgatgttgatattgatagaattaataagccagatttgccattggtttctggtgaaatgtcaatcgaaactgcttggattttatctatcatcgttgcattgactggtttgatcgttacaatttggttaaaatcagctccattgttcgtttttatatatatcttcggtatcttcgctggttttgcatactctgttccaccaattagatggaagcaataccctgcgactaatttcttgatcacaatttcttcacatgttggtttggcttttactgtgtacgcagctactctgtctgcattaggtttgccatttgtttggtcgccagcttttctgtttattatcgcttttatgactgttatgggtatgacaatcgctttcgcaaaggatatctctgatattgaaggtgacgctaaatacggtgtttcaactgttgctacaaaattgggtgcaagaaagatgacttgggttgtttctggtgttttgttgttgaactatttggtttctatctcaatcggtattatttggccacaagtttttaaatctaacatcatgatcttgtcacatgctatcttggcattcatgttgatcttccaaacaagagacttagctttggcaaattatgcttctggcccatcaagacaatttttcgagtttatttggttgttgtactacgctgaatattttgtttacgtttttatttga

SEQ ID NO: 494 - protein, 316 aa, synthetic construct
IEGSGHHESLNSIATKILNFGHTCWKLQRPYVVKGMISIAAGLFGRELLNNRHLFSWGLMAKAWFALVPILSFNFFAACMNQIYDVDIDRINKPDLPLVSGEMSIETAWILSIIVALTGLIVTIWLKSAPLFVFIYIFGIFAGFAYSVPPIRWKQYPATNFLITISSHVGLAFTVYAATLSALGLPFVWSPAFLFIIAFMTVMGMTIAFAKDISDIEGDAKYGVSTVATKLGARKMTWVVSGVLLLNYLVSISIGIIWPQVFKSNIMILSHAILAFMLIFQTRDLALANYASGPSRQFFEFIWLLYYAEYFVYVFI

SEQ ID NO: 495 - DNA, 951 bp, synthetic construct
  source 1..951: mol_type = other DNA
attgaaggttcagtgcatcatgaatctctgaactcaatcgcaactaaaattttgaactttggtcatacatgttggaaattgcaaagaccatacgttgttaagggtatgatttctattgctggcggtttatttggtagagaattgcgcaataacagacatttgttttcttggggtttgatggtgaaagcaatgttcgcattagttccaatcttgtcttttaatttctttgctgcagcaatgaaccaaatatatgatgttgatattgatagaattaataagccagatttgccattggtttctggtgaaatgtcaatcgaaactgcttggattttatctatcatcgttgcattgactggtttgatcgttacaatttggttaaaatcagctccattgttcgtttttatatatatcttcggtatcttcgctggttttgcatactctgttccaccaattagatggaagcaataccctgcgactaatttcttgatcacaatttcttcacatgttggtttggcttttactacgtacgcagctactctgtctgcattaggtttgccatttgtttggcagccagcttttctgtttattatcgcttttatgactgttatgggtatgacaatcgctttcgcaaaggatatctctgatattgaaggtgacgctaaatacggtgtttcaactgttgctacaaaattgggtgcaagatgcatgacttgggttgtttctggtgttttgttgttgaactatttggtttctatctcaatcggtattatttggccacaagtttttaaatctaacatcatgatcttgtcacatgctatcttggcattcatgttgatcttccaaacaagaaagttagctttggcaaattatgcttctgtcccatcaagacaatttttcgagtttatttggttgttgtactacgctgaatattttgtttacgtttttatttga

SEQ ID NO: 496 - protein, 316 aa, synthetic construct
IEGSVHHESLNSIATKILNFGHTCWKLQRPYVVKGMISIAGGLFGRELRNNRHLFSWGLMVKAMFALVPILSFNFFAAAMNQIYDVDIDRINKPDLPLVSGEMSIETAWILSIIVALTGLIVTIWLKSAPLFVFIYIFGIFAGFAYSVPPIRWKQYPATNFLITISSHVGLAFTTYAATLSALGLPFVWQPAFLFIIAFMTVMGMTIAFAKDISDIEGDAKYGVSTVATKLGARCMTWVVSGVLLLNYLVSISIGIIWPQVFKSNIMILSHAILAFMLIFQTRKLALANYASVPSRQFFEFIWLLYYAEYFVYVFI

SEQ ID NO: 497 - DNA, 951 bp, synthetic construct
  source 1..951: mol_type = other DNA
attgaaggttcagtgcatcatgaatcttggaactcaatcgcaactaaaattttgaactttggtcatacatgttggaaattgcaaagaccatacgttgttaagggtatgatttctattgctggcggtttatttggtagagaattgctgaataacagacatttgttttcttggggtttgatggcgaaagcagggttcgcattagttccaatcttgtcttttaatttctttgctgcagcaatgaaccaaatatatgatgttgatattgatagaattaataagccagatttgccattggtttctggtgaaatgtcaatcgaaactgcttggattttatctatcatcgttgcattgactggtttgatcgttacaattgtcttaaaatcagctccattgttcgtttttatatatatcttcggtatcttcgctggttttgcatactctgttccaccaattagatggaagcaataccctgcgactaatttcttgatcacaatttcttcacatgttggtttggcttttactacgtacggcgctactgtctctgcattaggtttgccatttgtttggcagccagcttttgtctttattatcgcttttatgactgttatgggtatgacaatcgctttcgcaaaggatatctctgatattgaaggtgacgctaaatacggtgtttcaactgttgctacaaaattgggtgcaagagtcatgacttgggttgtttctggtgttttgttgttgaactatttggtttctatctcaatcggtattatttggccacaagtttttaaatctaacatcatgatcttgtcacatgctatcttggcattcatgttgatcttccaaacaagaaagttagctttggcaaattatgcttctggcccatcaagacaatttttcgagtttatttggttgttgtactacgctgaatattttgtttacgtttttatttga

SEQ ID NO: 498 - protein, 316 aa, synthetic construct
IEGSVHHESWNSIATKILNFGHTCWKLQRPYVVKGMISIAGGLFGRELLNNRHLFSWGLMAKAGFALVPILSFNFFAAAMNQIYDVDIDRINKPDLPLVSGEMSIETAWILSIIVALTGLIVTIVLKSAPLFVFIYIFGIFAGFAYSVPPIRWKQYPATNFLITISSHVGLAFTTYGATVSALGLPFVWQPAFVFIIAFMTVMGMTIAFAKDISDIEGDAKYGVSTVATKLGARVMTWVVSGVLLLNYLVSISIGIIWPQVFKSNIMILSHAILAFMLIFQTRKLALANYASGPSRQFFEFIWLLYYAEYFVYVFI

SEQ ID NO: 499 - DNA, 951 bp, synthetic construct
  source 1..951: mol_type = other DNA
attgaaggttcagtgcatcatgaatcttggaactcaatcgcaactaaaattttgaactttggtcatacatgttggaaattgcaaagaccatacgttgttaagggtatgatttctattgctggcggtttatttggtagagaattgcgcaataacagacatttgttttcttggggtttgatggcgaaagcactgttcgcattagttccaatcttgtcttttaatttctttgctgcagcaatgaaccaaatatatgatgttgatattgatagaattaataagccagatttgccattggtttctggtgaaatgtcaatcgaaactgcttggattttatctatcatcgttgcattgactggtttgatcgttacaattatgttaaaatcagctccattgttcgtttttatatatatcttcggtatcttcgctggttttgcatactctgttccaccaattagatggaagcaataccctgggactaatttcttgatcacaatttcttcacatgttggtttggcttttactgggtacgcagctactctgtctgcattaggtttgccatttgtttggtcgccagcttttctgtttattatcgcttttatgactgttatgggtatgacaatcgctttcgcaaaggatatctctgatattgaaggtgacgctaaatacggtgtttcaactgttgctacaaaattgggtgcaagatgcatgacttgggttgtttctggtgttttgttgttgaactatttggtttctatctcaatcggtattatttggccacaagtttttaaatctaacatcatgatcttgtcacatgctatcttggcattcatgttgatcttccaaacaagagacttagctttggcaaattatgcttctggcccatcaagacaatttttcgagtttatttggttgttgtactacgctgaatattttgtttacgtttttatttga

SEQ ID NO: 500 - protein, 316 aa, synthetic construct
IEGSVHHESWNSIATKILNFGHTCWKLQRPYVVKGMISIAGGLFGRELRNNRHLFSWGLMAKALFALVPILSFNFFAAAMNQIYDVDIDRINKPDLPLVSGEMSIETAWILSIIVALTGLIVTIMLKSAPLFVFIYIFGIFAGFAYSVPPIRWKQYPGTNFLITISSHVGLAFTGYAATLSALGLPFVWSPAFLFIIAFMTVMGMTIAFAKDISDIEGDAKYGVSTVATKLGARCMTWVVSGVLLLNYLVSISIGIIWPQVFKSNIMILSHAILAFMLIFQTRDLALANYASGPSRQFFEFIWLLYYAEYFVYVFI

SEQ ID NO: 501 - DNA, 951 bp, synthetic construct
  source 1..951: mol_type = other DNA
attgaaggttcagtgcatcatgaatcttggaactcaatcgcaactaaaattttgaactttggtcatacatgttggaaattgcaaagaccatacgttgttaagggtatgatttctattgctggcggtttatttggtagagaattgcgcaataacagacatttgttttcttggggtttgatggcgaaagcaacgttcgcattagttccaatcttgtcttttaatttctttgctgcagcaatgaaccaaatatatgatgttgatattgatagaattaataagccagatttgccattggtttctggtgaaatgtcaatcgaaactgcttggattttatctatcatcgttgcattgactggtttgatcgttacaattgtcttaaaatcagctccattgttcgtttttatatatatcttcggtatcttcgctggttttgcatactctgttccaccaattagatggaagcaataccctgcgactaatttcttgatcacaatttcttcacatgttggtttggcttttactgcgtacacggctactcgctctgcattaggtttgccatttgtttggggcccagcttttgtctttattatcgcttttatgactgttatgggtatgacaatcgctttcgcaaaggatatctctgatattgaaggtgacgctaaatacggtgtttcaactgttgctacaaaattgggtgcaagaaagatgacttgggttgtttctggtgttttgttgttgaactatttggtttctatctcaatcggtattatttggccacaagtttttaaatctaacatcatgatcttgtcacatgctatcttggcattcatgttgatcttccaaacaagagacttagctttggcaaattatgcttctggcccatcaagacaatttttcgagtttatttggttgttgtactacgctgaatattttgtttacgtttttatttga

SEQ ID NO: 502 - protein, 316 aa, synthetic construct
IEGSVHHESWNSIATKILNFGHTCWKLQRPYVVKGMISIAGGLFGRELRNNRHLFSWGLMAKATFALVPILSFNFFAAAMNQIYDVDIDRINKPDLPLVSGEMSIETAWILSIIVALTGLIVTIVLKSAPLFVFIYIFGIFAGFAYSVPPIRWKQYPATNFLITISSHVGLAFTAYTATRSALGLPFVWGPAFVFIIAFMTVMGMTIAFAKDISDIEGDAKYGVSTVATKLGARKMTWVVSGVLLLNYLVSISIGIIWPQVFKSNIMILSHAILAFMLIFQTRDLALANYASGPSRQFFEFIWLLYYAEYFVYVFI

SEQ ID NO: 503 - DNA, 951 bp, synthetic construct
  source 1..951: mol_type = other DNA
attgaaggttcagggcatcatgaatcttggaactcaatcgcaactaaaattttgaactttggtcatacatgttggaaattgcaaagaccatacgttgttaagggtatgatttctattgcttcgggtttatttggtagagaattgctgaataacagacatttgttttcttggggtttgatggcgaaagcaacgttcgcattagttccaatcttgtcttttaatttctttgctgcatgcatgaaccaaatatatgatgttgatattgatagaattaataagccagatttgccattggtttctggtgaaatgtcaatcgaaactgcttggattttatctatcatcgttgcattgactggtttgatcgttacaattgtcttaaaatcagctccattgttcgtttttatatatatcttcggtatcttcgctggttttgcatactctgttccaccaattagatggaagcaataccctgcgactaatttcttgatcacaatttcttcacatgttggtttggcttttactgggtacgcagctactctgtctgcattaggtttgccatttgtttggtcgccagcttttgcgtttattatcgcttttatgactgttatgggtatgacaatcgctttcgcaaaggatatctctgatattgaaggtgacgctaaatacggtgtttcaactgttgctacaaaattgggtgcaagagtcatgactttggttgtttctggtgttttgttgttgaactatttggtttctatctcaatcggtattatttggccacaagtttttaaatctaacatcatgatcttgtcacatgctatcttggcattcgcgttgatcttccaaacaagagacttagctttggcaaattatgcttctggcccatcaagacaatttttcgagtttatttggttgttgtactacgctgaatattttgtttacgtttttatttga

SEQ ID NO: 504 - protein, 316 aa, synthetic construct
IEGSGHHESWNSIATKILNFGHTCWKLQRPYVVKGMISIASGLFGRELLNNRHLFSWGLMAKATFALVPILSFNFFAACMNQIYDVDIDRINKPDLPLVSGEMSIETAWILSIIVALTGLIVTIVLKSAPLFVFIYIFGIFAGFAYSVPPIRWKQYPATNFLITISSHVGLAFTGYAATLSALGLPFVWSPAFAFIIAFMTVMGMTIAFAKDISDIEGDAKYGVSTVATKLGARVMTLVVSGVLLLNYLVSISIGIIWPQVFKSNIMILSHAILAFALIFQTRDLALANYASGPSRQFFEFIWLLYYAEYFVYVFI

SEQ ID NO: 505 - DNA, 951 bp, synthetic construct
  source 1..951: mol_type = other DNA
attgaaggttcagtgcatcatgaatcttggaactcaatcgcaactaaaattttgaactttggtcatacatgttggaaattgcaaagaccatacgttgttaagggtatgatttctattgctggcggtttatttggtagagaattgctgaataacagacatttgttttcttggggtttgatggcgaaagcaatgttcgcattagttccaatcttgtcttttaatttctttgctgcagcaatgaaccaaatatatgatgttgatattgatagaattaataagccagatttgccattggtttctggtgaaatgtcaatcgaaactgcttggattttatctatcatcgttgcattgactggtttgatcgttacaattgtcttaaaatcagctccattgttcgtttttatatatatcttcggtatcttcgctggttttgcatactctgttccaccaattagatggaagcaataccctgcgactaatttcttgatcacaatttcttcacatgttggtttggcttttactgggtacggcgctactctgtctgcattaggtttgccatttgtttggcagccagcttttctgtttattatcgcttttatgactgttatgggtatgacaatcgctttcgcaaaggatatctctgatattgaaggtgacgctaaatacggtgtttcaactgttgctacaaaattgggtgcaagatgcatgactttggttgtttctggtgttttgttgttgaactatttggtttctatctcaatcggtattatttggccacaagtttttaaatctaacatcatgatcttgtcacatgctatcttggcattcgcgttgatcttccaaacaagagacttagctttggcaaattatgcttctgtcccatcaagacaatttttcgagtttatttggttgttgtactacgctgaatattttgtttacgtttttatttga

SEQ ID NO: 506 - protein, 316 aa, synthetic construct
IEGSVHHESWNSIATKILNFGHTCWKLQRPYVVKGMISIAGGLFGRELLNNRHLFSWGLMAKAMFALVPILSFNFFAAAMNQIYDVDIDRINKPDLPLVSGEMSIETAWILSIIVALTGLIVTIVLKSAPLFVFIYIFGIFAGFAYSVPPIRWKQYPATNFLITISSHVGLAFTGYGATLSALGLPFVWQPAFLFIIAFMTVMGMTIAFAKDISDIEGDAKYGVSTVATKLGARCMTLVVSGVLLLNYLVSISIGIIWPQVFKSNIMILSHAILAFALIFQTRDLALANYASVPSRQFFEFIWLLYYAEYFVYVFI

SEQ ID NO: 507 - DNA, 951 bp, synthetic construct
  source 1..951: mol_type = other DNA
attgaaggttcagggcatcatgaatctgtgaactcaatcgcaactaaaattttgaactttggtcatacatgttggaaattgcaaagaccatacgttgttaagggtatgatttctattgcttcgggtttatttggtagagaattgatgaataacagacatttgttttcttggggtttgatggcgaaagcatggttcgcattagttccaatcttgtcttttaatttctttgctgcatgcatgaaccaaatatatgatgttgatattgatagaattaataagccagatttgccattggtttctggtgaaatgtcaatcgaaactgcttggattttatctatcatcgttgcattgactggtttgatcgttacaattgtcttaaaatcagctccattgttcgtttttatatatatcttcggtatcttcgctggttttgcatactctgttccaccaattagatggaagcaataccctgggactaatttcttgatcacaatttcttcacatgttggtttggcttttactgggtacacggctactcgctctgcattaggtttgccatttgtttgggcgccagcttttctgtttattatcgcttttatgactgttatgggtatgacaatcgctttcgcaaaggatatctctgatattgaaggtgacgctaaatacggtgtttcaactgttgctacaaaattgggtgcaagatgcatgactttggttgtttctggtgttttgttgttgaactatttggtttctatctcaatcggtattatttggccacaagtttttaaatctaacatcatgatcttgtcacatgctatcttggcattcatgttgatcttccaaacaagacgcttagctttggcaaattatgcttctggcccatcaagacaatttttcgagtttatttggttgttgtactacgctgaatattttgtttacgtttttatttga

SEQ ID NO: 508 - protein, 316 aa, synthetic construct
IEGSGHHESVNSIATKILNFGHTCWKLQRPYVVKGMISIASGLFGRELMNNRHLFSWGLMAKAWFALVPILSFNFFAACMNQIYDVDIDRINKPDLPLVSGEMSIETAWILSIIVALTGLIVTIVLKSAPLFVFIYIFGIFAGFAYSVPPIRWKQYPGTNFLITISSHVGLAFTGYTATRSALGLPFVWAPAFLFIIAFMTVMGMTIAFAKDISDIEGDAKYGVSTVATKLGARCMTLVVSGVLLLNYLVSISIGIIWPQVFKSNIMILSHAILAFMLIFQTRRLALANYASGPSRQFFEFIWLLYYAEYFVYVFI

SEQ ID NO: 509 - DNA, 951 bp, synthetic construct
  source 1..951: mol_type = other DNA
attgaaggttcagggcatcatgaatctgtgaactcaatcgcaactaaaattttgaactttggtcatacatgttggaaattgcaaagaccatacgttgttaagggtatgatttctattgctggcggtttatttggtagagaattgcgcaataacagacatttgttttcttggggtttgatggtgaaagcaatgttcgcattagttccaatcttgtcttttaatttctttgctgcagcaatgaaccaaatatatgatgttgatattgatagaattaataagccagatttgccattggtttctggtgaaatgtcaatcgaaactgcttggattttatctatcatcgttgcattgactggtttgatcgttacaattgtcttaaaatcagctccattgttcgtttttatatatatcttcggtatcttcgctggttttgcatactctgttccaccaattagatggaagcaataccctgggactaatttcttgatcacaatttcttcacatgttggtttggcttttactgggtacggcgctactgtctctgcattaggtttgccatttgtttggtcgccagcttttgtctttattatcgcttttatgactgttatgggtatgacaatcgctttcgcaaaggatatctctgatattgaaggtgacgctaaatacggtgtttcaactgttgctacaaaattgggtgcaagaaagatgacttgggttgtttctggtgttttgttgttgaactatttggtttctatctcaatcggtattatttggccacaagtttttaaatctaacatcatgatcttgtcacatgctatcttggcattcgcgttgatcttccaaacaagaaagttagctttggcaaattatgcttctggcccatcaagacaatttttcgagtttatttggttgttgtactacgctgaatattttgtttacgtttttatttga

SEQ ID NO: 510 - protein, 316 aa, synthetic construct
IEGSGHHESVNSIATKILNFGHTCWKLQRPYVVKGMISIAGGLFGRELRNNRHLFSWGLMVKAMFALVPILSFNFFAAAMNQIYDVDIDRINKPDLPLVSGEMSIETAWILSIIVALTGLIVTIVLKSAPLFVFIYIFGIFAGFAYSVPPIRWKQYPGTNFLITISSHVGLAFTGYGATVSALGLPFVWSPAFVFIIAFMTVMGMTIAFAKDISDIEGDAKYGVSTVATKLGARKMTWVVSGVLLLNYLVSISIGIIWPQVFKSNIMILSHAILAFALIFQTRKLALANYASGPSRQFFEFIWLLYYAEYFVYVFI

SEQ ID NO: 511 - DNA, 951 bp, synthetic construct
  source 1..951: mol_type = other DNA
attgaaggttcagggcatcatgaatctctgaactcaatcgcaactaaaattttgaactttggtcatacatgttggaaattgcaaagaccatacgttgttaagggtatgatttctattgcttcgggtttatttggtagagaattgctgaataacagacatttgttttcttggggtttgatggtgaaagcactgttcgcattagttccaatcttgtcttttaatttctttgctgcagcaatgaaccaaatatatgatgttgatattgatagaattaataagccagatttgccattggtttctggtgaaatgtcaatcgaaactgcttggattttatctatcatcgttgcattgactggtttgatcgttacaattatgttaaaatcagctccattgttcgtttttatatatatcttcggtatcttcgctggttttgcatactctgttccaccaattagatggaagcaataccctgcgactaatttcttgatcacaatttcttcacatgttggtttggcttttactgggtacggcgctactgtctctgcattaggtttgccatttgtttgggcgccagcttttgcgtttattatcgcttttatgactgttatgggtatgacaatcgctttcgcaaaggatatctctgatattgaaggtgacgctaaatacggtgtttcaactgttgctacaaaattgggtgcaagaaagatgacttgggttgtttctggtgttttgttgttgaactatttggtttctatctcaatcggtattatttggccacaagtttttaaatctaacatcatgatcttgtcacatgctatcttggcattcatgttgatcttccaaacaagagacttagctttggcaaattatgcttctggcccatcaagacaatttttcgagtttatttggttgttgtactacgctgaatattttgtttacgtttttatttga

SEQ ID NO: 512 - protein, 316 aa, synthetic construct
IEGSGHHESLNSIATKILNFGHTCWKLQRPYVVKGMISIASGLFGRELLNNRHLFSWGLMVKALFALVPILSFNFFAAAMNQIYDVDIDRINKPDLPLVSGEMSIETAWILSIIVALTGLIVTIMLKSAPLFVFIYIFGIFAGFAYSVPPIRWKQYPATNFLITISSHVGLAFTGYGATVSALGLPFVWAPAFAFIIAFMTVMGMTIAFAKDISDIEGDAKYGVSTVATKLGARKMTWVVSGVLLLNYLVSISIGIIWPQVFKSNIMILSHAILAFMLIFQTRDLALANYASGPSRQFFEFIWLLYYAEYFVYVFI

SEQ ID NO: 513 - DNA, 951 bp, synthetic construct
  source 1..951: mol_type = other DNA
attgaaggttcaccacatcatgaatctgataactcaatcgcaactaaaattttgaactttggtcatacatgttggaaattgcaaagaccatacgttgttaagggtatgatttctattgcttgtggtttatttggtagagaattgcgcaataacagacatttgttttcttggggtttgatggtgaaagcaatgttcgcattagttccaatcttgtcttttaatttctttgctgcagcaatgaaccaaatatatgatgttgatattgatagaattaataagccagatttgccattggtttctggtgaaatgtcaatcgaaactgcttggattttatctatcatcgttgcattgactggtttgatcgttacaatttggttaaaatcagctccattgttcgtttttatatatatcttcggtatcttcgctggttttgcatactctgttccaccaattagatggaagcaataccctgcgactaatttcttgatcacaatttcttcacatgttggtttggcttttactgggtacgcagctactgtctctgcattaggtttgccatttgtttggcagccagcttttgtctttattatcgcttttatgactgttatgggtatgacaatcgctttcgcaaaggatatctctgatattgaaggtgacgctaaatacggtgtttcaactgttgctacaaaattgggtgcaagagtcatgacttgggttgtttctggtgttttgttgttgaactatttggtttctatctcaatcggtattatttggccacaagtttttaaatctaacatcatgatcttgtcacatgctatcttggcattcatgttgatcttccaaacaagacgcttagctttggcaaattatgcttctggcccatcaagacaatttttcgagtttatttggttgttgtactacgctgaatattttgtttacgtttttatttga

SEQ ID NO: 514 - protein, 316 aa, synthetic construct
IEGSPHHESDNSIATKILNFGHTCWKLQRPYVVKGMISIACGLFGRELRNNRHLFSWGLMVKAMFALVPILSFNFFAAAMNQIYDVDIDRINKPDLPLVSGEMSIETAWILSIIVALTGLIVTIWLKSAPLFVFIYIFGIFAGFAYSVPPIRWKQYPATNFLITISSHVGLAFTGYAATVSALGLPFVWQPAFVFIIAFMTVMGMTIAFAKDISDIEGDAKYGVSTVATKLGARVMTWVVSGVLLLNYLVSISIGIIWPQVFKSNIMILSHAILAFMLIFQTRRLALANYASGPSRQFFEFIWLLYYAEYFVYVFI

SEQ ID NO: 515 - DNA, 915 bp, synthetic construct
  source 1..915: mol_type = other DNA
atcgcaactaaaattttgaactttggtcatacatgttggaaattgcaaagaccatacgttgttaagggtatgatttctattgcttgtggtttatttggtagagaattgtttaataacagacatttgttttcttggggtttgatgtggaaagcatttttcgcattagttccaatcttgtcttttaatttctttgctgcaatcatgaaccaaatatatgatgttgatattgatagaattaataagccagatttgccattggtttctggtgaaatgtcaatcgaaactgcttggattttatctatcatcgttgcattgactggtttgatcgttacaattaaattaaaatcagctccattgttcgtttttatatatatcttcggtatcttcgctggttttgcatactctgttccaccaattagatggaagcaatacccttttactaatttcttgatcacaatttcttcacatgttggtttggcttttacttcttactcagctactacatctgcattaggtttgccatttgtttggaggccagctttttcttttattatcgcttttatgactgttatgggtatgacaatcgctttcgcaaaggatatctctgatattgaaggtgacgctaaatacggtgtttcaactgttgctacaaaattgggtgcaagaaacatgactttcgttgtttctggtgttttgttgttgaactatttggtttctatctcaatcggtattatttggccacaagtttttaaatctaacatcatgatcttgtcacatgctatcttggcattctgtttgatcttccaaacaagagaattagctttggcaaattatgcttctgcaccatcaagacaatttttcgagtttatttggttgttgtactacgctgaatattttgtttacgtttttatttga

SEQ ID NO: 516 - protein, 304 aa, synthetic construct
IATKILNFGHTCWKLQRPYVVKGMISIACGLFGRELFNNRHLFSWGLMWKAFFALVPILSFNFFAAIMNQIYDVDIDRINKPDLPLVSGEMSIETAWILSIIVALTGLIVTIKLKSAPLFVFIYIFGIFAGFAYSVPPIRWKQYPFTNFLITISSHVGLAFTSYSATTSALGLPFVWRPAFSFIIAFMTVMGMTIAFAKDISDIEGDAKYGVSTVATKLGARNMTFVVSGVLLLNYLVSISIGIIWPQVFKSNIMILSHAILAFCLIFQTRELALANYASAPSRQFFEFIWLLYYAEYFVYVFI

SEQ ID NO: 517 - DNA, 921 bp, synthetic construct
  source 1..921: mol_type = other DNA
aactcaatcgcaactaaaattttgaactttggtcatacatgttggaaattgcaaagaccatacgttgttaagggtatgatttctattgcttgtggtttatttggtagagaattgtttaataacagacatttgttttcttggggtttgatgtggaaagcatttttcgcattagttccaatcttgtcttttaatttctttgctgcaatcatgaaccaaatatatgatgttgatattgatagaattaataagccagatttgccattggtttctggtgaaatgtcaatcgaaactgcttggattttatctatcatcgttgcattgactggtttgatcgttacaattaaattaaaatcagctccattgttcgtttttatatatatcttcggtatcttcgctggttttgcatactctgttccaccaattagatggaagcaatacccttttactaatttcttgatcacaatttcttcacatgttggtttggcttttacttcttactcagctactacatctgcattaggtttgccatttgtttggaggccagctttttcttttattatcgcttttatgactgttatgggtatgacaatcgctttcgcaaaggatatctctgatattgaaggtgacgctaaatacggtgtttcaactgttgctacaaaattgggtgcaagaaacatgactttcgttgtttctggtgttttgttgttgaactatttggtttctatctcaatcggtattatttggccacaagtttttaaatctaacatcatgatcttgtcacatgctatcttggcattctgtttgatcttccaaacaagagaattagctttggcaaattatgcttctgcaccatcaagacaatttttcgagtttatttggttgttgtactacgctgaatattttgtttacgtttttatttga

SEQ ID NO: 518 - protein, 306 aa, synthetic construct
NSIATKILNFGHTCWKLQRPYVVKGMISIACGLFGRELFNNRHLFSWGLMWKAFFALVPILSFNFFAAIMNQIYDVDIDRINKPDLPLVSGEMSIETAWILSIIVALTGLIVTIKLKSAPLFVFIYIFGIFAGFAYSVPPIRWKQYPFTNFLITISSHVGLAFTSYSATTSALGLPFVWRPAFSFIIAFMTVMGMTIAFAKDISDIEGDAKYGVSTVATKLGARNMTFVVSGVLLLNYLVSISIGIIWPQVFKSNIMILSHAILAFCLIFQTRELALANYASAPSRQFFEFIWLLYYAEYFVYVFI

SEQ ID NO: 519 - DNA, 927 bp, synthetic construct
  source 1..927: mol_type = other DNA
tctgataactcaatcgcaactaaaattttgaactttggtcatacatgttggaaattgcaaagaccatacgttgttaagggtatgatttctattgcttgtggtttatttggtagagaattgtttaataacagacatttgttttcttggggtttgatgtggaaagcatttttcgcattagttccaatcttgtcttttaatttctttgctgcaatcatgaaccaaatatatgatgttgatattgatagaattaataagccagatttgccattggtttctggtgaaatgtcaatcgaaactgcttggattttatctatcatcgttgcattgactggtttgatcgttacaattaaattaaaatcagctccattgttcgtttttatatatatcttcggtatcttcgctggttttgcatactctgttccaccaattagatggaagcaatacccttttactaatttcttgatcacaatttcttcacatgttggtttggcttttacttcttactcagctactacatctgcattaggtttgccatttgtttggaggccagctttttcttttattatcgcttttatgactgttatgggtatgacaatcgctttcgcaaaggatatctctgatattgaaggtgacgctaaatacggtgtttcaactgttgctacaaaattgggtgcaagaaacatgactttcgttgtttctggtgttttgttgttgaactatttggtttctatctcaatcggtattatttggccacaagtttttaaatctaacatcatgatcttgtcacatgctatcttggcattctgtttgatcttccaaacaagagaattagctttggcaaattatgcttctgcaccatcaagacaatttttcgagtttatttggttgttgtactacgctgaatattttgtttacgtttttatttga

SEQ ID NO: 520 - protein, 308 aa, synthetic construct
SDNSIATKILNFGHTCWKLQRPYVVKGMISIACGLFGRELFNNRHLFSWGLMWKAFFALVPILSFNFFAAIMNQIYDVDIDRINKPDLPLVSGEMSIETAWILSIIVALTGLIVTIKLKSAPLFVFIYIFGIFAGFAYSVPPIRWKQYPFTNFLITISSHVGLAFTSYSATTSALGLPFVWRPAFSFIIAFMTVMGMTIAFAKDISDIEGDAKYGVSTVATKLGARNMTFVVSGVLLLNYLVSISIGIIWPQVFKSNIMILSHAILAFCLIFQTRELALANYASAPSRQFFEFIWLLYYAEYFVYVFI

SEQ ID NO: 521 - DNA, 939 bp, synthetic construct
  source 1..939: mol_type = other DNA
ccacatcatgaatctgataactcaatcgcaactaaaattttgaactttggtcatacatgttggaaattgcaaagaccatacgttgttaagggtatgatttctattgcttgtggtttatttggtagagaattgtttaataacagacatttgttttcttggggtttgatgtggaaagcatttttcgcattagttccaatcttgtcttttaatttctttgctgcaatcatgaaccaaatatatgatgttgatattgatagaattaataagccagatttgccattggtttctggtgaaatgtcaatcgaaactgcttggattttatctatcatcgttgcattgactggtttgatcgttacaattaaattaaaatcagctccattgttcgtttttatatatatcttcggtatcttcgctggttttgcatactctgttccaccaattagatggaagcaatacccttttactaatttcttgatcacaatttcttcacatgttggtttggcttttacttcttactcagctactacatctgcattaggtttgccatttgtttggaggccagctttttcttttattatcgcttttatgactgttatgggtatgacaatcgctttcgcaaaggatatctctgatattgaaggtgacgctaaatacggtgtttcaactgttgctacaaaattgggtgcaagaaacatgactttcgttgtttctggtgttttgttgttgaactatttggtttctatctcaatcggtattatttggccacaagtttttaaatctaacatcatgatcttgtcacatgctatcttggcattctgtttgatcttccaaacaagagaattagctttggcaaattatgcttctgcaccatcaagacaatttttcgagtttatttggttgttgtactacgctgaatattttgtttacgtttttatttga

SEQ ID NO: 522 - protein, 312 aa, synthetic construct
PHHESDNSIATKILNFGHTCWKLQRPYVVKGMISIACGLFGRELFNNRHLFSWGLMWKAFFALVPILSFNFFAAIMNQIYDVDIDRINKPDLPLVSGEMSIETAWILSIIVALTGLIVTIKLKSAPLFVFIYIFGIFAGFAYSVPPIRWKQYPFTNFLITISSHVGLAFTSYSATTSALGLPFVWRPAFSFIIAFMTVMGMTIAFAKDISDIEGDAKYGVSTVATKLGARNMTFVVSGVLLLNYLVSISIGIIWPQVFKSNIMILSHAILAFCLIFQTRELALANYASAPSRQFFEFIWLLYYAEYFVYVFI

SEQ ID NO: 523 - DNA, 945 bp, synthetic construct
  source 1..945: mol_type = other DNA
ggttcaccacatcatgaatctgataactcaatcgcaactaaaattttgaactttggtcatacatgttggaaattgcaaagaccatacgttgttaagggtatgatttctattgcttgtggtttatttggtagagaattgtttaataacagacatttgttttcttggggtttgatgtggaaagcatttttcgcattagttccaatcttgtcttttaatttctttgctgcaatcatgaaccaaatatatgatgttgatattgatagaattaataagccagatttgccattggtttctggtgaaatgtcaatcgaaactgcttggattttatctatcatcgttgcattgactggtttgatcgttacaattaaattaaaatcagctccattgttcgtttttatatatatcttcggtatcttcgctggttttgcatactctgttccaccaattagatggaagcaatacccttttactaatttcttgatcacaatttcttcacatgttggtttggcttttacttcttactcagctactacatctgcattaggtttgccatttgtttggaggccagctttttcttttattatcgcttttatgactgttatgggtatgacaatcgctttcgcaaaggatatctctgatattgaaggtgacgctaaatacggtgtttcaactgttgctacaaaattgggtgcaagaaacatgactttcgttgtttctggtgttttgttgttgaactatttggtttctatctcaatcggtattatttggccacaagtttttaaatctaacatcatgatcttgtcacatgctatcttggcattctgtttgatcttccaaacaagagaattagctttggcaaattatgcttctgcaccatcaagacaatttttcgagtttatttggttgttgtactacgctgaatattttgtttacgtttttatttga

SEQ ID NO: 524 - protein, 314 aa, synthetic construct
GSPHHESDNSIATKILNFGHTCWKLQRPYVVKGMISIACGLFGRELFNNRHLFSWGLMWKAFFALVPILSFNFFAAIMNQIYDVDIDRINKPDLPLVSGEMSIETAWILSIIVALTGLIVTIKLKSAPLFVFIYIFGIFAGFAYSVPPIRWKQYPFTNFLITISSHVGLAFTSYSATTSALGLPFVWRPAFSFIIAFMTVMGMTIAFAKDISDIEGDAKYGVSTVATKLGARNMTFVVSGVLLLNYLVSISIGIIWPQVFKSNIMILSHAILAFCLIFQTRELALANYASAPSRQFFEFIWLLYYAEYFVYVFI

SEQ ID NO: 525 - DNA, 1056 bp, synthetic construct
  source 1..1056: mol_type = other DNA
atggcttcagaaaaagaaattaggagagagagattcttgaacgttttccctaaattagtagaggaattgaacgcatcgcttttggcttacggtatgcctaaggaagcatgtgactggtatgcccactcattgaactacaacactccaggcggtaagctaaatagaggtttgtccgttgtggacacgtatgctattctctccaacaagaccgttgaacaattggggcaagaagaatacgaaaaggttgccattctaggttggtgcattgagttgttgcaggcttactggttggtcgccgatgatatgatggacaagtccattaccagaagaggccaaccatgttggtacaaggttcctgaagttggggaaattgccatctgggacgcattcatgttagaggctgctatctacaagcttttgaaatctcacttcagaaacgaaaaatactacatagatatcaccgaattgttccatgaggtcaccttccaaaccgaattgggccaattgatggacttaatcactgcacctgaagacaaagtcgacttgagtaagttctccctaaagaagcactccttcatagttactttcaagactgcttactattctttctacttgcctgtcgcattggccatgtacgttgccggtatcacggatgaaaaggatttgaaacaagccagagatgtcttgattccattgggtgaatacttccaaattcaagatgactacttagactgcttcggtaccccagaacagatcggtaagatcggtacagatatccaagataacaaatgttcttgggtaatcaacaaggcattggaacttgcttccgcagaacaaagaaagactttagacgaaaattacggtaagaaggactcagtcgcagaagccaaatgcaaaaagattttcaatgacttgaaaattgaacagctataccacgaatatgaagagtctattgccaaggatttgaaggccaaaatttctcaggtcgatgagtctcgtggcttcaaagctgatgtcttaactgcgttcttgaacaaagtttacaagagaagcaaa

SEQ ID NO: 526 - protein, 352 aa, synthetic construct
MASEKEIRRERFLNVFPKLVEELNASLLAYGMPKEACDWYAHSLNYNTPGGKLNRGLSVVDTYAILSNKTVEQLGQEEYEKVAILGWCIELLQAYWLVADDMMDKSITRRGQPCWYKVPEVGEIAIWDAFMLEAAIYKLLKSHFRNEKYYIDITELFHEVTFQTELGQLMDLITAPEDKVDLSKFSLKKHSFIVTFKTAYYSFYLPVALAMYVAGITDEKDLKQARDVLIPLGEYFQIQDDYLDCFGTPEQIGKIGTDIQDNKCSWVINKALELASAEQRKTLDENYGKKDSVAEAKCKKIFNDLKIEQLYHEYEESIAKDLKAKISQVDESRGFKADVLTAFLNKVYKRSK

SEQ ID NO: 527 - DNA, 2037 bp, synthetic construct
  source 1..2037: mol_type = other DNA
atggcttcagaaaaagaaattaggagagagagattcttgaacgttttccctaaattagtagaggaattgaacgcatcgcttttggcttacggtatgcctaaggaagcatgtgactggtatgcccactcattgaactacaacactccaggcggtaagctaaatagaggtttgtccgttgtggacacgtatgctattctctccaacaagaccgttgaacaattggggcaagaagaatacgaaaaggttgccattctaggttggtgcattgagttgttgcaggcttactggttggtcgccgatgatatgatggacaagtccattaccagaagaggccaaccatgttggtacaaggttcctgaagttggggaaattgccatctgggacgcattcatgttagaggctgctatctacaagcttttgaaatctcacttcagaaacgaaaaatactacatagatatcaccgaattgttccatgaggtcaccttccaaaccgaattgggccaattgatggacttaatcactgcacctgaagacaaagtcgacttgagtaagttctccctaaagaagcactccttcatagttactttcaagactgcttactattctttctacttgcctgtcgcattggccatgtacgttgccggtatcacggatgaaaaggatttgaaacaagccagagatgtcttgattccattgggtgaatacttccaaattcaagatgactacttagactgcttcggtaccccagaacagatcggtaagatcggtacagatatccaagataacaaatgttcttgggtaatcaacaaggcattggaacttgcttccgcagaacaaagaaagactttagacgaaaattacggtaagaaggactcagtcgcagaagccaaatgcaaaaagattttcaatgacttgaaaattgaacagctataccacgaatatgaagagtctattgccaaggatttgaaggccaaaatttctcaggtcgatgagtctcgtggcttcaaagctgatgtcttaactgcgttcttgaacaaagtttacaagagaagcaaaggtagcggcagcggtagcggtagcggcagcattgaaggttcaccacatcatgaatctgataactcaatcgcaactaaaattttgaactttggtcatacatgttggaaattgcaaagaccatacgttgttaagggtatgatttctattgcttgtggtttatttggtagagaattgtttaataacagacatttgttttcttggggtttgatgtggaaagcatttttcgcattagttccaatcttgtcttttaatttctttgctgcaatcatgaaccaaatatatgatgttgatattgatagaattaataagccagatttgccattggtttctggtgaaatgtcaatcgaaactgcttggattttatctatcatcgttgcattgactggtttgatcgttacaattaaattaaaatcagctccattgttcgtttttatatatatcttcggtatcttcgctggttttgcatactctgttccaccaattagatggaagcaatacccttttactaatttcttgatcacaatttcttcacatgttggtttggcttttacttcttactcagctactacatctgcattaggtttgccatttgtttggaggccagctttttcttttattatcgcttttatgactgttatgggtatgacaatcgctttcgcaaaggatatctctgatattgaaggtgacgctaaatacggtgtttcaactgttgctacaaaattgggtgcaagaaacatgactttcgttgtttctggtgttttgttgttgaactatttggtttctatctcaatcggtattatttggccacaagtttttaaatctaacatcatgatcttgtcacatgctatcttggcattctgtttgatcttccaaacaagagaattagctttggcaaattatgcttctgcaccatcaagacaatttttcgagtttatttggttgttgtactacgctgaatattttgtttacgtttttatttga

SEQ ID NO: 528 - protein, 678 aa, synthetic construct
MASEKEIRRERFLNVFPKLVEELNASLLAYGMPKEACDWYAHSLNYNTPGGKLNRGLSVVDTYAILSNKTVEQLGQEEYEKVAILGWCIELLQAYWLVADDMMDKSITRRGQPCWYKVPEVGEIAIWDAFMLEAAIYKLLKSHFRNEKYYIDITELFHEVTFQTELGQLMDLITAPEDKVDLSKFSLKKHSFIVTFKTAYYSFYLPVALAMYVAGITDEKDLKQARDVLIPLGEYFQIQDDYLDCFGTPEQIGKIGTDIQDNKCSWVINKALELASAEQRKTLDENYGKKDSVAEAKCKKIFNDLKIEQLYHEYEESIAKDLKAKISQVDESRGFKADVLTAFLNKVYKRSKGSGSGSGSGSIEGSPHHESDNSIATKILNFGHTCWKLQRPYVVKGMISIACGLFGRELFNNRHLFSWGLMWKAFFALVPILSFNFFAAIMNQIYDVDIDRINKPDLPLVSGEMSIETAWILSIIVALTGLIVTIKLKSAPLFVFIYIFGIFAGFAYSVPPIRWKQYPFTNFLITISSHVGLAFTSYSATTSALGLPFVWRPAFSFIIAFMTVMGMTIAFAKDISDIEGDAKYGVSTVATKLGARNMTFVVSGVLLLNYLVSISIGIIWPQVFKSNIMILSHAILAFCLIFQTRELALANYASAPSRQFFEFIWLLYYAEYFVYVFI

SEQ ID NO: 529 - DNA, 415 bp, synthetic construct
  source 1..415: mol_type = other DNA
acggattagaagccgccgagcgggtgacagccctccgaaggaacactctcctccgtgcgtcctcctcttcaccggtcgcgttcctgaaacgcagatgtgcctcgcgccgcactgctccgaacaataaagattctacaatactagcttttatggttatgaagaggaaaaattggcagtaacctggccccacaaaccttcaaatgaacgaatcaaattaacaaccataggatgataatgcgattagttttttagccttatttctggggtaattaatcagcgaagcgatgatttttgatctattaacagatatataaatgcaaaaactgcataaccactttaactaatactttcaacattttcggtttgtattacttcttattcaaatgtaataaaagtatcaacaaaaaattgttaa

SEQ ID NO: 530 - DNA, 270 bp, synthetic construct
  source 1..270: mol_type = other DNA
tcatgtaattagttatgtcacgcttacattcacgccctccccccacatccgctctaaccgaaaaggaaggagttagacaacctgaagtctaggtccctatttatttttttatagttatgttagtattaagaacgttatttatatttcaaatttttcttttttttctgtacagacgcgtgtacgcatgtaacattatactgaaaaccttgcttgagaaggttttgggacgctcgaaggctttaatttgcggcccctcacctgcacgcaaaa

SEQ ID NO: 531 - DNA, 720 bp, synthetic construct
  source 1..720: mol_type = other DNA
atggtctcaaagggtgaggaattgttcaccggagttgtccccatccttgtagaattagatggtgatgttaacggtcacaagttctcagtctcaggagaaggagaaggtgacgcaacatatggtaaattgactcttaaactaatctgcaccacaggtaagttaccagtcccgtggcctactttggtcacaactcttggttatgggttgcaatgctttgctaggtaccccgatcacatgaaacaacacgacttcttcaaatcagcaatgccagaaggatatgtgcaggaaagaacaattttcttcaaagatgacggtaactataagacacgtgccgaagtgaagttcgaaggtgacactctagttaataggatcgagttgaagggaattgactttaaagaggacggtaatattctaggacataagctggaatacaactataacagccacaacgtatacataactgccgataaacagaagaacgggattaaagccaattttaaaatcaggcacaacatagaagacggtggtgttcagttagctgatcattatcagcagaacacaccaataggtgacggacctgtgctattaccagacaaccattatctgtcttaccaatccgctctgtctaaagatccaaacgaaaagagagatcacatggttttgctagaatttgtcacagcagcagggatcaccttaggaatggatgagctatataagtga

SEQ ID NO: 532 - DNA, 60 bp, synthetic construct
  source 1..60: mol_type = other DNA
ccacaacaagctgtgacccactgacggtaatggagcataattttgcgtgcaggtgagggg

SEQ ID NO: 533 - DNA, 24 bp, synthetic construct
  source 1..24: mol_type = other DNA
ccatgaggtcaccttccaaaccga

SEQ ID NO: 534 - DNA, 30 bp, synthetic construct
  source 1..30: mol_type = other DNA
gttctccctaaagaagcactccttcatagt

SEQ ID NO: 535 - DNA, 24 bp, synthetic construct
  source 1..24: mol_type = other DNA
gacccactgacggtaatggagcat

SEQ ID NO: 536 - DNA, 21 bp, synthetic construct
  source 1..21: mol_type = other DNA
tgcacctgaagacaaagtcga

SEQ ID NO: 537 - DNA, 24 bp, synthetic construct
  source 1..24: mol_type = other DNA
gcaaattaaagccttcgagcgtcc

SEQ ID NO: 538 - DNA, 57 bp, synthetic construct
  source 1..57: mol_type = other DNA
tttagttgcgattgagttatcagattcatgatgacctgaaccttcaatgctgccgct

SEQ ID NO: 539 - DNA, 57 bp, synthetic construct
  source 1..57: mol_type = other DNA
tctgttattaaacaattctctaccaaataaaccagaagcaatagaaatcataccctt

SEQ ID NO: 540 - DNA, 57 bp, synthetic construct
  source 1..57: mol_type = other DNA
tctgttattaaacaattctctaccaaataaaccagcagcaatagaaatcataccctt

SEQ ID NO: 541 - DNA, 57 bp, synthetic construct
  source 1..57: mol_type = other DNA
tctgttattaaacaattctttaccaaataaaccagaagcaatagaaatcataccctt

SEQ ID NO: 542 - DNA, 57 bp, synthetic construct
  source 1..57: mol_type = other DNA
tctgttattaaacaattctttaccaaataaaccagcagcaatagaaatcataccctt

SEQ ID NO: 543 - DNA, 42 bp, synthetic construct
  source 1..42: mol_type = other DNA
atcatatatttggttcatagctgcagcaaagaaattaaaaga

SEQ ID NO: 544 - DNA, 42 bp, synthetic construct
  source 1..42: mol_type = other DNA
atcatatatttggttcatacatgcagcaaagaaattaaaaga

SEQ ID NO: 545 - DNA, 42 bp, synthetic construct
  source 1..42: mol_type = other DNA
agtaaaagggtattgcttcaatctaattggtggaacagagta

SEQ ID NO: 546 - DNA, 57 bp, synthetic construct
  source 1..57: mol_type = other DNA
tttagttgcgattgagttatcagattcacaatgtggtgaaccttcaatgctgccgct

SEQ ID NO: 547 - DNA, 45 bp, synthetic construct
  source 1..45: mol_type = other DNA
ctttgcgaaagcgattgtcatagacataacagtcataaaagcgat

SEQ ID NO: 548 - DNA, 45 bp, synthetic construct
  source 1..45: mol_type = other DNA
ctttgcgaaagcgattgtaccacccataacagtcataaaagcgat

SEQ ID NO: 549 - DNA, 45 bp, synthetic construct
  source 1..45: mol_type = other DNA
ctttgcgaaagcgattgtaccagacataacagtcataaaagcgat

SEQ ID NO: 550 - DNA, 48 bp, synthetic construct
  source 1..48: mol_type = other DNA
aataataccgattgagatagaaacagcatagttcaacaacaaaacacc

SEQ ID NO: 551 - DNA, 48 bp, synthetic construct
  source 1..48: mol_type = other DNA
aataataccgattgagatagcaaccaaatagttcaacaacaaaacacc

SEQ ID NO: 552 - DNA, 48 bp, synthetic construct
  source 1..48: mol_type = other DNA
aataataccgattgagatagcaacagcatagttcaacaacaaaacacc

SEQ ID NO: 553 - DNA, 54 bp, synthetic construct
  source 1..54: mol_type = other DNA
aaactcgaaaaattgtcttgatggtgcagattcataatttgccaaagctaattc

SEQ ID NO: 554 - DNA, 54 bp, synthetic construct
  source 1..54: mol_type = other DNA
aaactcgaaaaattgtctagctggtgcagaagcataatttgccaaagctaattc

SEQ ID NO: 555 - DNA, 57 bp, synthetic construct
  source 1..57: mol_type = other DNA
tttagttgcgattgagttaacagattcatgatgtggtgaaccttcaatgctgccgct

SEQ ID NO: 556 - DNA, 54 bp, synthetic construct
  source 1..54: mol_type = other DNA
aaactcgaaaaattgtctagctggtgcagattcataatttgccaaagctaattc

SEQ ID NO: 557 - DNA, 60 bp, synthetic construct
  source 1..60: mol_type = other DNA
tttgaaatataaataacgttcttaatactaacataactataaaaaaataaatagggacct

SEQ ID NO: 558 - DNA, 57 bp, synthetic construct
  source 1..57: mol_type = other DNA
tttagttgcgattgagttatcagattcacaatgacctgaaccttcaatgctgccgct

SEQ ID NO: 559 - DNA, 57 bp, synthetic construct
  source 1..57: mol_type = other DNA
tttagttgcgattgagttaacagattcatgatgacctgaaccttcaatgctgccgct

SEQ ID NO: 560 - DNA, 57 bp, synthetic construct
  source 1..57: mol_type = other DNA
tttagttgcgattgagttaacagattcacaatgtggtgaaccttcaatgctgccgct

SEQ ID NO: 561 - DNA, 57 bp, synthetic construct
  source 1..57: mol_type = other DNA
tttagttgcgattgagttaacagattcacaatgacctgaaccttcaatgctgccgct

SEQ ID NO: 562 - DNA, 57 bp, synthetic construct
  source 1..57: mol_type = other DNA
tctgttattaaacaattctttaccaaataaaccacaagcaatagaaatcataccctt

SEQ ID NO: 563 - DNA, 57 bp, synthetic construct; identical to SEQ ID NO: 538
  source 1..57: mol_type = other DNA

SEQ ID NO: 564 - DNA, 57 bp, synthetic construct; identical to SEQ ID NO: 539
  source 1..57: mol_type = other DNA

SEQ ID NO: 565 - DNA, 57 bp, synthetic construct; identical to SEQ ID NO: 540
  source 1..57: mol_type = other DNA

SEQ ID NO: 566 - DNA, 57 bp, synthetic construct; identical to SEQ ID NO: 541
  source 1..57: mol_type = other DNA

SEQ ID NO: 567 - DNA, 57 bp, synthetic construct; identical to SEQ ID NO: 542
  source 1..57: mol_type = other DNA

SEQ ID NO: 568 - DNA, 42 bp, synthetic construct; identical to SEQ ID NO: 543
  source 1..42: mol_type = other DNA

SEQ ID NO: 569 - DNA, 42 bp, synthetic construct; identical to SEQ ID NO: 544
  source 1..42: mol_type = other DNA

SEQ ID NO: 570 - DNA, 57 bp, synthetic construct; identical to SEQ ID NO: 546
  source 1..57: mol_type = other DNA

SEQ ID NO: 571 - DNA, 45 bp, synthetic construct; identical to SEQ ID NO: 547
  source 1..45: mol_type = other DNA

SEQ ID NO: 572 - DNA, 45 bp, synthetic construct; identical to SEQ ID NO: 548
  source 1..45: mol_type = other DNA

SEQ ID NO: 573 - DNA, 45 bp, synthetic construct; identical to SEQ ID NO: 549
  source 1..45: mol_type = other DNA

SEQ ID NO: 574 - DNA, 48 bp, synthetic construct; identical to SEQ ID NO: 550
  source 1..48: mol_type = other DNA

SEQ ID NO: 575 - DNA, 48 bp, synthetic construct; identical to SEQ ID NO: 551
  source 1..48: mol_type = other DNA

SEQ ID NO: 576 - DNA, 48 bp, synthetic construct; identical to SEQ ID NO: 552
  source 1..48: mol_type = other DNA

SEQ ID NO: 577 - DNA, 54 bp, synthetic construct; identical to SEQ ID NO: 553
  source 1..54: mol_type = other DNA

SEQ ID NO: 578 - DNA, 54 bp, synthetic construct; identical to SEQ ID NO: 554
  source 1..54: mol_type = other DNA

SEQ ID NO: 579 - DNA, 57 bp, synthetic construct; identical to SEQ ID NO: 555
  source 1..57: mol_type = other DNA

SEQ ID NO: 580 - DNA, 54 bp, synthetic construct; identical to SEQ ID NO: 556
  source 1..54: mol_type = other DNA

SEQ ID NO: 581 - DNA, 60 bp, synthetic construct; identical to SEQ ID NO: 557
  source 1..60: mol_type = other DNA

SEQ ID NO: 582 - DNA, 42 bp, synthetic construct
  source 1..42: mol_type = other DNA
gataccgaagatatatataccaacgaacaatggagctgattt

SEQ ID NO: 583 - DNA, 57 bp, synthetic construct; identical to SEQ ID NO: 558
  source 1..57: mol_type = other DNA

SEQ ID NO: 584 - DNA, 57 bp, synthetic construct; identical to SEQ ID NO: 559
  source 1..57: mol_type = other DNA

SEQ ID NO: 585 - DNA, 57 bp, synthetic construct; identical to SEQ ID NO: 560
  source 1..57: mol_type = other DNA

SEQ ID NO: 586 - DNA, 57 bp, synthetic construct; identical to SEQ ID NO: 561
  source 1..57: mol_type = other DNA

SEQ ID NO: 587 - DNA, 57 bp, synthetic construct; identical to SEQ ID NO: 562
  source 1..57: mol_type = other DNA

SEQ ID NO: 588 - DNA, 57 bp, synthetic construct; identical to SEQ ID NO: 538
  source 1..57: mol_type = other DNA

SEQ ID NO: 589 - DNA, 57 bp, synthetic construct; identical to SEQ ID NO: 539
  source 1..57: mol_type = other DNA

SEQ ID NO: 590 - DNA, 57 bp, synthetic construct; identical to SEQ ID NO: 540
  source 1..57: mol_type = other DNA

SEQ ID NO: 591 - DNA, 57 bp, synthetic construct; identical to SEQ ID NO: 541
  source 1..57: mol_type = other DNA

SEQ ID NO: 592 - DNA, 57 bp, synthetic construct; identical to SEQ ID NO: 542
  source 1..57: mol_type = other DNA

SEQ ID NO: 593 - DNA, 42 bp, synthetic construct; identical to SEQ ID NO: 543
  source 1..42: mol_type = other DNA

SEQ ID NO: 594 - DNA, 42 bp, synthetic construct; identical to SEQ ID NO: 544
  source 1..42: mol_type = other DNA

SEQ ID NO: 595 - DNA, 57 bp, synthetic construct; identical to SEQ ID NO: 546
  source 1..57: mol_type = other DNA

SEQ ID NO: 596 - DNA, 45 bp, synthetic construct; identical to SEQ ID NO: 547
  source 1..45: mol_type = other DNA

SEQ ID NO: 597 - DNA, 45 bp, synthetic construct; identical to SEQ ID NO: 548
  source 1..45: mol_type = other DNA

SEQ ID NO: 598 - DNA, 45 bp, synthetic construct; identical to SEQ ID NO: 549
  source 1..45: mol_type = other DNA

SEQ ID NO: 599 - DNA, 48 bp, synthetic construct; identical to SEQ ID NO: 550
  source 1..48: mol_type = other DNA

SEQ ID NO: 600 - DNA, 48 bp, synthetic construct; identical to SEQ ID NO: 551
  source 1..48: mol_type = other DNA

SEQ ID NO: 601 - DNA, 48 bp, synthetic construct; identical to SEQ ID NO: 552
  source 1..48: mol_type = other DNA

SEQ ID NO: 602 - DNA, 54 bp, synthetic construct; identical to SEQ ID NO: 553
  source 1..54: mol_type = other DNA

SEQ ID NO: 603 - DNA, 54 bp, synthetic construct; identical to SEQ ID NO: 554
  source 1..54: mol_type = other DNA

SEQ ID NO: 604 - DNA, 57 bp, synthetic construct; identical to SEQ ID NO: 555
  source 1..57: mol_type = other DNA

SEQ ID NO: 605 - DNA, 54 bp, synthetic construct; identical to SEQ ID NO: 556
  source 1..54: mol_type = other DNA

SEQ ID NO: 606 - DNA, 60 bp, synthetic construct; identical to SEQ ID NO: 557
  source 1..60: mol_type = other DNA

SEQ ID NO: 607 - DNA, 42 bp, synthetic construct
  source 1..42: mol_type = other DNA
caatggagctgattttaaccaaattgtaacgatcaaaccagt

SEQ ID NO: 608 - DNA, 57 bp, synthetic construct; identical to SEQ ID NO: 558
  source 1..57: mol_type = other DNA

SEQ ID NO: 609 - DNA, 57 bp, synthetic construct; identical to SEQ ID NO: 559
  source 1..57: mol_type = other DNA

SEQ ID NO: 610 - DNA, 57 bp, synthetic construct; identical to SEQ ID NO: 560
  source 1..57: mol_type = other DNA

SEQ ID NO: 611 - DNA, 57 bp, synthetic construct; identical to SEQ ID NO: 561
  source 1..57: mol_type = other DNA

SEQ ID NO: 612 - DNA, 57 bp, synthetic construct; identical to SEQ ID NO: 562
  source 1..57: mol_type = other DNA

SEQ ID NO: 613 - DNA, 57 bp, synthetic construct; identical to SEQ ID NO: 538
  source 1..57: mol_type = other DNA

SEQ ID NO: 614 - DNA, 57 bp, synthetic construct; identical to SEQ ID NO: 546
  source 1..57: mol_type = other DNA

SEQ ID NO: 615 - DNA, 48 bp, synthetic construct; identical to SEQ ID NO: 550
  source 1..48: mol_type = other DNA

SEQ ID NO: 616 - DNA, 48 bp, synthetic construct; identical to SEQ ID NO: 551
  source 1..48: mol_type = other DNA

SEQ ID NO: 617 - DNA, 48 bp, synthetic construct; identical to SEQ ID NO: 552
  source 1..48: mol_type = other DNA

SEQ ID NO: 618 - DNA, 54 bp, synthetic construct; identical to SEQ ID NO: 553
  source 1..54: mol_type = other DNA

SEQ ID NO: 619 - DNA, 54 bp, synthetic construct; identical to SEQ ID NO: 554
  source 1..54: mol_type = other DNA

SEQ ID NO: 620 - DNA, 57 bp, synthetic construct; identical to SEQ ID NO: 555
  source 1..57: mol_type = other DNA

SEQ ID NO: 621 - DNA, 54 bp, synthetic construct; identical to SEQ ID NO: 556
  source 1..54: mol_type = other DNA

SEQ ID NO: 622 - DNA, 60 bp, synthetic construct; identical to SEQ ID NO: 557
  source 1..60: mol_type = other DNA

SEQ ID NO: 623 - DNA, 42 bp, synthetic construct; identical to SEQ ID NO: 607
  source 1..42: mol_type = other DNA

SEQ ID NO: 624 - DNA, 51 bp, synthetic construct
  source 1..51: mol_type = other DNA
accccaagaaaacaaatgtctgttattcaacaattctctaccaaataaacc

SEQ ID NO: 625 - DNA, 51 bp, synthetic construct
  source 1..51: mol_type = other DNA
accccaagaaaacaaatgtgggttattaaacaattctctaccaaataaacc

SEQ ID NO: 626 - DNA, 51 bp, synthetic construct
  source 1..51: mol_type = other DNA
accccaagaaaacaaatgtgggttattcaacaattctctaccaaataaacc

SEQ ID NO: 627 - DNA, 57 bp, synthetic construct; identical to SEQ ID NO: 558
  source 1..57: mol_type = other DNA

SEQ ID NO: 628 - DNA, 57 bp, synthetic construct
  source 1..57: mol_type = other DNA
tggcaaacctaatgcagatctagtagctgagtaagaagtaaaagccaaaccaacatg

SEQ ID NO: 629 - DNA, 57 bp, synthetic construct
  source 1..57: mol_type = other DNA
tggcaaacctaatgcagatgtagtagctgagtaaacagtaaaagccaaaccaacatg

SEQ ID NO: 630 - DNA, 57 bp, synthetic construct
  source 1..57: mol_type = other DNA
tggcaaacctaatgcagatgtagtagctgagtaagtagtaaaagccaaaccaacatg

SEQ ID NO: 631 - DNA, 57 bp, synthetic construct
  source 1..57: mol_type = other DNA
tggcaaacctaatgcagatgtagtagcagtgtaagaagtaaaagccaaaccaacatg

SEQ ID NO: 632 - DNA, 57 bp, synthetic construct
  source 1..57: mol_type = other DNA
tggcaaacctaatgcagatgtagtagcagcgtaagaagtaaaagccaaaccaacatg

SEQ ID NO: 633 - DNA, 57 bp, synthetic construct
  source 1..57: mol_type = other DNA
tggcaaacctaatgcagatgtagtagcagtgtaaacagtaaaagccaaaccaacatg

SEQ ID NO: 634 - DNA, 57 bp, synthetic construct
  source 1..57: mol_type = other DNA
tggcaaacctaatgcagatgtagtagcagcgtaaacagtaaaagccaaaccaacatg

SEQ ID NO: 635 - DNA, 57 bp, synthetic construct
  source 1..57: mol_type = other DNA
tggcaaacctaatgcagatgtagtagcagtgtaagtagtaaaagccaaaccaacatg

SEQ ID NO: 636 - DNA, 57 bp, synthetic construct; identical to SEQ ID NO: 559
  source 1..57: mol_type = other DNA

SEQ ID NO: 637 - DNA, 57 bp, synthetic construct
  source 1..57: mol_type = other DNA
tggcaaacctaatgcagatgtagtagcagcgtaagtagtaaaagccaaaccaacatg

SEQ ID NO: 638 - DNA, 57 bp, synthetic construct
  source 1..57: mol_type = other DNA
tggcaaacctaatgcagatctagtagctgagtaaacagtaaaagccaaaccaacatg

SEQ ID NO: 639 - DNA, 57 bp, synthetic construct
  source 1..57: mol_type = other DNA
tggcaaacctaatgcagatctagtagctgagtaagtagtaaaagccaaaccaacatg

SEQ ID NO: 640 - DNA, 57 bp, synthetic construct
  source 1..57: mol_type = other DNA
tggcaaacctaatgcagatctagtagcagtgtaagaagtaaaagccaaaccaacatg

SEQ ID NO: 641 - DNA, 57 bp, synthetic construct
  source 1..57: mol_type = other DNA
tggcaaacctaatgcagatctagtagcagcgtaagaagtaaaagccaaaccaacatg

SEQ ID NO: 642 - DNA, 57 bp, synthetic construct
  source 1..57: mol_type = other DNA
tggcaaacctaatgcagatctagtagcagtgtaaacagtaaaagccaaaccaacatg

SEQ ID NO: 643 - DNA, 57 bp, synthetic construct
  source 1..57: mol_type = other DNA
tggcaaacctaatgcagatctagtagcagcgtaaacagtaaaagccaaaccaacatg

SEQ ID NO: 644 - DNA, 57 bp, synthetic construct
  source 1..57: mol_type = other DNA
tggcaaacctaatgcagatctagtagcagtgtaagtagtaaaagccaaaccaacatg

SEQ ID NO: 645 - DNA, 57 bp, synthetic construct
  source 1..57: mol_type = other DNA
tggcaaacctaatgcagatctagtagcagcgtaagtagtaaaagccaaaccaacatg

SEQ ID NO: 646 - DNA, 57 bp, synthetic construct; identical to SEQ ID NO: 560
  source 1..57: mol_type = other DNA

SEQ ID NO: 647 - DNA, 57 bp, synthetic construct; identical to SEQ ID NO: 561
  source 1..57: mol_type = other DNA

SEQ ID NO: 648 - DNA, 57 bp, synthetic construct; identical to SEQ ID NO: 538
  source 1..57: mol_type = other DNA

SEQ ID NO: 649 - DNA, 57 bp, synthetic construct; identical to SEQ ID NO: 546
  source 1..57: mol_type = other DNA

SEQ ID NO: 650 - DNA, 48 bp, synthetic construct; identical to SEQ ID NO: 550
  source 1..48: mol_type = other DNA

SEQ ID NO: 651 - DNA, 48 bp, synthetic construct; identical to SEQ ID NO: 551
  source 1..48: mol_type = other DNA

SEQ ID NO: 652 - DNA, 48 bp, synthetic construct; identical to SEQ ID NO: 552
  source 1..48: mol_type = other DNA

SEQ ID NO: 653 - DNA, 57 bp, synthetic construct; identical to SEQ ID NO: 555
  source 1..57: mol_type = other DNA

SEQ ID NO: 654 - DNA, 60 bp, synthetic construct; identical to SEQ ID NO: 557
  source 1..60: mol_type = other DNA

SEQ ID NO: 655 - DNA, 42 bp, synthetic construct; identical to SEQ ID NO: 607
  source 1..42: mol_type = other DNA

SEQ ID NO: 656 - DNA, 51 bp, synthetic construct; identical to SEQ ID NO: 624
  source 1..51: mol_type = other DNA

SEQ ID NO: 657 - DNA, 51 bp, synthetic construct; identical to SEQ ID NO: 625
  source 1..51: mol_type = other DNA

SEQ ID NO: 658 - DNA, 51 bp, synthetic construct; identical to SEQ ID NO: 626
  source 1..51: mol_type = other DNA

SEQ ID NO: 659 - DNA, 57 bp, synthetic construct; identical to SEQ ID NO: 558
  source 1..57: mol_type = other DNA

SEQ ID NO: 660 - DNA, 57 bp, synthetic construct; identical to SEQ ID NO: 628
  source 1..57: mol_type = other DNA

SEQ ID NO: 661 - DNA, 57 bp, synthetic construct; identical to SEQ ID NO: 629
  source 1..57: mol_type = other DNA

SEQ ID NO: 662 - DNA, 57 bp, synthetic construct; identical to SEQ ID NO: 630
  source 1..57: mol_type = other DNA

SEQ ID NO: 663 - DNA, 57 bp, synthetic construct; identical to SEQ ID NO: 631
  source 1..57: mol_type = other DNA

SEQ ID NO: 664 - DNA, 57 bp, synthetic construct; identical to SEQ ID NO: 632
  source 1..57: mol_type = other DNA

SEQ ID NO: 665 - DNA, 57 bp, synthetic construct; identical to SEQ ID NO: 633
  source 1..57: mol_type = other DNA

SEQ ID NO: 666 - DNA, 57 bp, synthetic construct; identical to SEQ ID NO: 634
  source 1..57: mol_type = other DNA

SEQ ID NO: 667 - DNA, 57 bp, synthetic construct; identical to SEQ ID NO: 635
  source 1..57: mol_type = other DNA

SEQ ID NO: 668 - DNA, 57 bp, synthetic construct; identical to SEQ ID NO: 559
  source 1..57: mol_type = other DNA

SEQ ID NO: 669 - DNA, 57 bp, synthetic construct; identical to SEQ ID NO: 637
  source 1..57: mol_type = other DNA

SEQ ID NO: 670 - DNA, 57 bp, synthetic construct; identical to SEQ ID NO: 638
  source 1..57: mol_type = other DNA

SEQ ID NO: 671 - DNA, 57 bp, synthetic construct; identical to SEQ ID NO: 639
  source 1..57: mol_type = other DNA

SEQ ID NO: 672 - DNA, 57 bp, synthetic construct; identical to SEQ ID NO: 640
  source 1..57: mol_type = other DNA

SEQ ID NO: 673 - DNA, 57 bp, synthetic construct; identical to SEQ ID NO: 641
  source 1..57: mol_type = other DNA

SEQ ID NO: 674 - DNA, 57 bp, synthetic construct; identical to SEQ ID NO: 642
  source 1..57: mol_type = other DNA

SEQ ID NO: 675 - DNA, 57 bp, synthetic construct; identical to SEQ ID NO: 643
  source 1..57: mol_type = other DNA

SEQ ID NO: 676 - DNA, 57 bp, synthetic construct; identical to SEQ ID NO: 644
  source 1..57: mol_type = other DNA

SEQ ID NO: 677 - DNA, 57 bp, synthetic construct; identical to SEQ ID NO: 645
  source 1..57: mol_type = other DNA

SEQ ID NO: 678 - DNA, 57 bp, synthetic construct; identical to SEQ ID NO: 560
  source 1..57: mol_type = other DNA

SEQ ID NO: 679 - DNA, 42 bp, synthetic construct
  source 1..42: mol_type = other DNA
ataatttgccaaagctaattttcttgtttggaagatcaaaca

SEQ ID NO: 680 - DNA, 42 bp, synthetic construct
  source 1..42: mol_type = other DNA
ataatttgccaaagctaatcttcttgtttggaagatcaaaca

SEQ ID NO: 681 - DNA, 57 bp, synthetic construct; identical to SEQ ID NO: 561
  source 1..57: mol_type = other DNA

SEQ ID NO: 682 - DNA, 57 bp, synthetic construct; identical to SEQ ID NO: 538
  source 1..57: mol_type = other DNA

SEQ ID NO: 683 - DNA, 57 bp, synthetic construct; identical to SEQ ID NO: 546
  source 1..57: mol_type = other DNA

SEQ ID NO: 684 - DNA, 57 bp, synthetic construct; identical to SEQ ID NO: 555
  source 1..57: mol_type = other DNA

SEQ ID NO: 685 - DNA, 60 bp, synthetic construct; identical to SEQ ID NO: 557
  source 1..60: mol_type = other DNA

SEQ ID NO: 686 - DNA, 42 bp, synthetic construct; identical to SEQ ID NO: 582
  source 1..42: mol_type = other DNA

SEQ ID NO: 687 - DNA, 57 bp, synthetic construct; identical to SEQ ID NO: 558
  source 1..57: mol_type = other DNA

SEQ ID NO: 688 - DNA, 57 bp, synthetic construct; identical to SEQ ID NO: 559
  source 1..57: mol_type = other DNA

SEQ ID NO: 689 - DNA, 57 bp, synthetic construct; identical to SEQ ID NO: 560
  source 1..57: mol_type = other DNA

SEQ ID NO: 690 - DNA, 42 bp, synthetic construct
  source 1..42: mol_type = other DNA
gattggaactaatgcgaaagttgctttccacatcaaacccca

SEQ ID NO: 691 - DNA, 48 bp, synthetic construct
  source 1..48: mol_type = other DNA
aataaaagaaaaagctggcctccaagcaaatggcaaacctaatgcaga

SEQ ID NO: 692 - DNA, 48 bp, synthetic construct
  source 1..48: mol_type = other DNA
aataaaagaaaaagctggagaccaaacaaatggcaaacctaatgcaga

SEQ ID NO: 693 - DNA, 48 bp, synthetic construct
  source 1..48: mol_type = other DNA
aataaaagaaaaagctggagaccaagcaaatggcaaacctaatgcaga

SEQ ID NO: 694 - DNA, 54 bp, synthetic construct
  source 1..54: mol_type = other DNA
caaagctaattctcttgtttgtctgatcaaacagaatgccaagatagcatgtga

SEQ ID NO: 695 - DNA, 54 bp, synthetic construct
  source 1..54: mol_type = other DNA
caaagctaattctcttgttctgaagatcaaacagaatgccaagatagcatgtga

SEQ ID NO: 696 - DNA, 57 bp, synthetic construct; identical to SEQ ID NO: 561
  source 1..57: mol_type = other DNA

SEQ ID NO: 697 - DNA, 54 bp, synthetic construct
  source 1..54: mol_type = other DNA
caaagctaattctcttgttcttctgatcaaacagaatgccaagatagcatgtga

SEQ ID NO: 698 - DNA, 54 bp, synthetic construct
  source 1..54: mol_type = other DNA
caaagctaattctcttgtttggaagatcaacatgaatgccaagatagcatgtga

SEQ ID NO: 699 - DNA, 54 bp, synthetic construct
  source 1..54: mol_type = other DNA
caaagctaattctcttgtttggaagatcaaagcgaatgccaagatagcatgtga

SEQ ID NO: 700 - DNA, 54 bp, synthetic construct
  source 1..54: mol_type = other DNA
caaagctaattctcttgtttgtctgatcaacatgaatgccaagatagcatgtga

SEQ ID NO: 701 - DNA, 54 bp, synthetic construct
  source 1..54: mol_type = other DNA
caaagctaattctcttgtttgtctgatcaaagcgaatgccaagatagcatgtga

SEQ ID NO: 702 - DNA, 54 bp, synthetic construct
  source 1..54: mol_type = other DNA
caaagctaattctcttgttctgaagatcaacatgaatgccaagatagcatgtga

SEQ ID NO: 703 - DNA, 54 bp, synthetic construct
  source 1..54: mol_type = other DNA
caaagctaattctcttgttctgaagatcaaagcgaatgccaagatagcatgtga

SEQ ID NO: 704 - DNA, 54 bp, synthetic construct
  source 1..54: mol_type = other DNA
caaagctaattctcttgttcttctgatcaacatgaatgccaagatagcatgtga

SEQ ID NO: 705 - DNA, 54 bp, synthetic construct
  source 1..54: mol_type = other DNA
caaagctaattctcttgttcttctgatcaaagcgaatgccaagatagcatgtga

SEQ ID NO: 706 - DNA, 57 bp, synthetic construct; identical to SEQ ID NO: 538
  source 1..57: mol_type = other DNA

SEQ ID NO: 707 - DNA, 42 bp, synthetic construct; identical to SEQ ID NO: 545
  source 1..42: mol_type = other DNA

SEQ ID NO: 708 - DNA, 57 bp, synthetic construct; identical to SEQ ID NO: 546
  source 1..57: mol_type = other DNA

SEQ ID NO: 709 - DNA, 48 bp, synthetic construct; identical to SEQ ID NO: 550
  source 1..48: mol_type = other DNA

SEQ ID NO: 710 - DNA, 48 bp, synthetic construct; identical to SEQ ID NO: 551
  source 1..48: mol_type = other DNA

SEQ ID NO: 711 - DNA, 48 bp, synthetic construct; identical to SEQ ID NO: 552
  source 1..48: mol_type = other DNA

SEQ ID NO: 712 - DNA, 57 bp, synthetic construct; identical to SEQ ID NO: 555
  source 1..57: mol_type = other DNA

SEQ ID NO: 713 - DNA, 60 bp, synthetic construct; identical to SEQ ID NO: 557
  source 1..60: mol_type = other DNA

SEQ ID NO: 714 - DNA, 57 bp, synthetic construct; identical to SEQ ID NO: 558
  source 1..57: mol_type = other DNA

SEQ ID NO: 715 - DNA, 57 bp, synthetic construct; identical to SEQ ID NO: 559
  source 1..57: mol_type = other DNA

SEQ ID NO: 716 - DNA, 57 bp, synthetic construct; identical to SEQ ID NO: 560
  source 1..57: mol_type = other DNA

SEQ ID NO: 717 - DNA, 42 bp, synthetic construct; identical to SEQ ID NO: 679
  source 1..42: mol_type = other DNA

SEQ ID NO: 718 - DNA, 42 bp, synthetic construct; identical to SEQ ID NO: 680
  source 1..42: mol_type = other DNA

SEQ ID NO: 719 - DNA, 57 bp, synthetic construct; identical to SEQ ID NO: 561
  source 1..57: mol_type = other DNA

SEQ ID NO: 720 - DNA, 42 bp, synthetic construct
  source 1..42: mol_type = other DNA
aaagaaattaaaagacaatcttggaactaatgcgaaaaatgc

SEQ ID NO: 721 - DNA, 42 bp, synthetic construct
  source 1..42: mol_type = other DNA
aaagaaattaaaagacaagattggaactaatgcgaaaaatgc

SEQ ID NO: 722 - DNA, 42 bp, synthetic construct
  source 1..42: mol_type = other DNA
cataaaagcgataataaaaacaaaagctggcctccaaacaaa

SEQ ID NO: 723 - DNA, 42 bp, synthetic construct
  source 1..42: mol_type = other DNA
cataaaagcgataataaacaaaaaagctggcctccaaacaaa

SEQ ID NO: 724 - DNA, 50 bp, synthetic construct
  source 1..50: mol_type = other DNA
aagtttacaagagaagcaaaggtagcggcagcggtagcggtagcggcagc

SEQ ID NO: 725 - DNA, 50 bp, synthetic construct
  source 1..50: mol_type = other DNA
tgatcatgtaattagttatgtcacgcttacattcacgccctccccccaca

SEQ ID NO: 726 - DNA, 50 bp, synthetic construct
  source 1..50: mol_type = other DNA
cggcagcggtagcggtagcggcagcggttcaccacatcatgaatctgata

SEQ ID NO: 727 - DNA, 50 bp, synthetic construct
  source 1..50: mol_type = other DNA
cggcagcggtagcggtagcggcagcccacatcatgaatctgataactcaa

SEQ ID NO: 728 - DNA, 50 bp, synthetic construct
  source 1..50: mol_type = other DNA
cggcagcggtagcggtagcggcagccatgaatctgataactcaatcgcaa

SEQ ID NO: 729 - DNA, 50 bp, synthetic construct
  source 1..50: mol_type = other DNA
cggcagcggtagcggtagcggcagctctgataactcaatcgcaactaaaa

SEQ ID NO: 730 - DNA, 50 bp, synthetic construct
  source 1..50: mol_type = other DNA
cggcagcggtagcggtagcggcagcaactcaatcgcaactaaaattttga

SEQ ID NO: 731 - DNA, 50 bp, synthetic construct
  source 1..50: mol_type = other DNA
cggcagcggtagcggtagcggcagcatcgcaactaaaattttgaactttg

SEQ ID NO: 732 - DNA, 50 bp, synthetic construct
  source 1..50: mol_type = other DNA
cggcagcggtagcggtagcggcagcactaaaattttgaactttggtcata

SEQ ID NO: 733 - DNA, 50 bp, synthetic construct
  source 1..50: mol_type = other DNA
cggcagcggtagcggtagcggcagcattttgaactttggtcatacatgtt

SEQ ID NO: 734 - DNA, 50 bp, synthetic construct
  source 1..50: mol_type = other DNA
cggcagcggtagcggtagcggcagcaactttggtcatacatgttggaaat

SEQ ID NO: 735 - DNA, 50 bp, synthetic construct
  source 1..50: mol_type = other DNA
cggcagcggtagcggtagcggcagcggtcatacatgttggaaattgcaaa

SEQ ID NO: 736 - DNA, 50 bp, synthetic construct
  source 1..50: mol_type = other DNA
cggcagcggtagcggtagcggcagcacatgttggaaattgcaaagaccat

SEQ ID NO: 737 - DNA, 50 bp, synthetic construct
  source 1..50: mol_type = other DNA
cggcagcggtagcggtagcggcagctggaaattgcaaagaccatacgttg

SEQ ID NO: 738 - DNA, 50 bp, synthetic construct
  source 1..50: mol_type = other DNA
cggcagcggtagcggtagcggcagcttgcaaagaccatacgttgttaagg

SEQ ID NO: 739 - DNA, 50 bp, synthetic construct
  source 1..50: mol_type = other DNA
cggcagcggtagcggtagcggcagcagaccatacgttgttaagggtatga

SEQ ID NO: 740 - DNA, 50 bp, synthetic construct
  source 1..50: mol_type = other DNA
cggcagcggtagcggtagcggcagctacgttgttaagggtatgatttcta

SEQ ID NO: 741 - DNA, 50 bp, synthetic construct
  source 1..50: mol_type = other DNA
cggcagcggtagcggtagcggcagcgttaagggtatgatttctattgctt

SEQ ID NO: 742 - DNA, 50 bp, synthetic construct
  source 1..50: mol_type = other DNA
cggcagcggtagcggtagcggcagcggtatgatttctattgcttgtggtt

SEQ ID NO: 743 - DNA, 50 bp, synthetic construct
  source 1..50: mol_type = other DNA
cggcagcggtagcggtagcggcagcatttctattgcttgtggtttatttg

SEQ ID NO: 744 - DNA, 50 bp, synthetic construct
  source 1..50: mol_type = other DNA
cggcagcggtagcggtagcggcagcattgcttgtggtttatttggtagag

SEQ ID NO: 745 - DNA, 50 bp, synthetic construct
  source 1..50: mol_type = other DNA
cggcagcggtagcggtagcggcagctgtggtttatttggtagagaattgt

SEQ ID NO: 746 - DNA, 50 bp, synthetic construct
  source 1..50: mol_type = other DNA
cggcagcggtagcggtagcggcagcttatttggtagagaattgtttaata

SEQ ID NO: 747 - DNA, 50 bp, synthetic construct
  source 1..50: mol_type = other DNA
cggcagcggtagcggtagcggcagcggtagagaattgtttaataacagac

SEQ ID NO: 748 - DNA, 50 bp, synthetic construct
  source 1..50: mol_type = other DNA
cggcagcggtagcggtagcggcagcgaattgtttaataacagacatttgt

SEQ ID NO: 749 - DNA, 50 bp, synthetic construct
  source 1..50: mol_type = other DNA
cggcagcggtagcggtagcggcagctttaataacagacatttgttttctt

SEQ ID NO: 750 - DNA, 50 bp, synthetic construct
  source 1..50: mol_type = other DNA
cggcagcggtagcggtagcggcagcaacagacatttgttttcttggggtt

SEQ ID NO: 751 - DNA, 50 bp, synthetic construct
  source 1..50: mol_type = other DNA
cggcagcggtagcggtagcggcagccatttgttttcttggggtttgatgt

SEQ ID NO: 752 - DNA, 50 bp, synthetic construct
  source 1..50: mol_type = other DNA
cggcagcggtagcggtagcggcagcttttcttggggtttgatgtggaaag

SEQ ID NO: 753 - DNA, 50 bp, synthetic construct
  source 1..50: mol_type = other DNA
cggcagcggtagcggtagcggcagctggggtttgatgtggaaagcatttt

SEQ ID NO: 754 - DNA, 50 bp, synthetic construct
  source 1..50: mol_type = other DNA
cggcagcggtagcggtagcggcagcttgatgtggaaagcatttttcgcat

SEQ ID NO: 755 - DNA, 50 bp, synthetic construct
  source 1..50: mol_type = other DNA
cggcagcggtagcggtagcggcagctggaaagcatttttcgcattagttc

SEQ ID NO: 756 - DNA, 60 bp, synthetic construct; identical to SEQ ID NO: 532
  source 1..60: mol_type = other DNA

SEQ ID NO: 757 - DNA, 24 bp, synthetic construct
  source 1..24: mol_type = other DNA
ccatgaggtcaccttccaaaccga

SEQ ID NO: 758 - DNA, 18 bp, synthetic construct
  source 1..18: mol_type = other DNA
gctgccgctaccgctacc

SEQ ID NO: 759 - DNA, 30 bp, synthetic construct; identical to SEQ ID NO: 534
  source 1..30: mol_type = other DNA

SEQ ID NO: 760 - DNA, 24 bp, synthetic construct
  source 1..24: mol_type = other DNA
gcaaattaaagccttcgagcgtcc

What is claimed is:

1. A recombinant polypeptide having prenyltransferase activity, wherein the polypeptide comprises an amino acid sequence of at least 80% identity to SEQ ID NO: 20 and an amino acid difference as compared to SEQ ID NO: 20 at one or more positions selected from: W61, F64, I79, F134, W153, F158, S175, S177, T180, N235, E284, and A293; optionally, wherein the amino acid differences are selected from: W61A, W61V, F64G, F64L, F64M, F64T, F64W, I179A, I79C, I79N, I79S, F134G, F134V, W153L, F158A, F158G, F158S, S175A, S175G, S175T, S175V, Y176S, S177A, S177G, S177T, T180I, T180L, T180R, T180V, N235C, N235K, N235V, E284D, E284K, E284R, A293G, A293K, and A293V.

2. The polypeptide of claim 1, wherein the polypeptide further comprises an amino acid residue difference as compared to SEQ ID NO: 20 at one or more positions selected from: P5, H7, D10, N11, K34, C41, R46, F49, N50, R52, L54, G58, F65, V68, F75, M80, D87, I91, K93, D95, V99, I105, E106, I113, V115, I121, T123, K125, A129, F138, I140, F144, F161, I165, F173, Y176, S181, V188, R190, F193, S194, F195, I196, I197, M200, G204, M205, S214, E217, D219, T229, F238, S241, V243, L249, S251, S253, W258, S264, M267, F276, C277, L278, F280, Q281, T282, A286, L287, A288, Y290, A291, P294, S295, F299, F301, I302, W303, L304, L305, Y307, A308, E309, Y310, F311, V312, Y313, V314, and F315; optionally, wherein the amino acid differences are selected from: P5G, P5V, H7C, D10L, D10V, D10W, N11D, K34E, C41A, C41G, C41S, R46K, F49L, F49M, F49R, N50D, R52P, L54S, G58S, F65L, V68D, F75W, M80V, D87E, I91V, K93N, D95N, V99A, I105V, E106R, I113N, I113W, V115A, I121T, T123K, K125M, K125V, K125W, A129T, F138I, I140T, F144S, F161V, I165L, I165T, F173I, Y176S, S181R, V188A, V188S, R190A, R190G, R190Q, R190S, F193L, S194A, S194L, S194V, F195V, I196T, I197T, M200R, G204A, G204S, M205G, M205R, S214C, E217G, D219V, T229V, F238L, F238W, S241F, V243A, L249A, L249V, S251A, S251C, S253P, W258R, S264Y, M267T, F276L, C277A, C277M, C277R, L278P, F280G, F280L, F280R, Q281R, T282P, A286G, L287F, A288P, Y290S, A291E, P294E, S295A, F299L, F301S, I302L, W303C, L304R, L305S, Y307H, Y307S, A308E, A308P, A308R, E309V, Y310C, Y310P, Y310S, F311P, F311S, V312G, Y313H, Y313P, V314A, and F315S.

3. The polypeptide of claim 1, wherein the polypeptide comprises a combination of amino acid differences selected from:
F64T, E284R
F64T, I79C
F64T, S177A
F64T, T180R
F64T, I79C, W153L
F64T, I79C, F134G
F64T, F134G, S177A
F64T, S175V, S177A
F64T, I79C, W153L, T180R
F64T, F134G, S175V, S177A
F64T, F134G, S177A, T180R
F64T, F134G, W153L, S177T, T180R
F64T, I79A, W153L, S175V, T180R
F64T, I79A, W153L, S177A, T180R
F64T, F134G, S175T, S177T, T180R
F64T, I79C, F134G, S177A
F64T, I79C, F134G, S177A, T180R
F64T, F134G, W153L, S177A, T180R, E284K
F64T, I79C, W153L, S175T, S177T, T180R
F64T, I79C, W153L, S175T, T180R
F64T, W153L, S175V, S177A
F64T, W153L, S175V, S177A, T180R
F64T, W153L, S175V, S177T
F64T, W153L, S175V, V188A, R190S
I79A, S177T
I79C, F134G
I79C, W153L
I79A, F134G, S175V
I79A, F134G, W153L
I79A, S175V, S177T
I79A, S177A, T180R
I79A, W153L, E284K
I79C, S175V, S177T
I79C, S177A, T180R
I79C, W153L, S175T
I79C, W153L, S177T
I79A, S175V, T180R
I79A, W153L, S175T, T180R
I79C, F134G, W153L, S175V
I79C, S175T, S177T, T180R
I79C, F134G, S177A, T180R
I79C, W153L, S177T, T180R
I79A, W153L, S175V, S177T, T180R
I79C, F134G, S175T, S177A, T180R
I79C, F134G, W153L, S175T, T180I
I79C, W153L, S175V, S177T, T180R
I79N, F134G, S175V, S177T, T180R
I79A, F134G, W153L, S175T, S177T, T180R
F134G, S177T
F134G, T180R
F134G, W153L
F134G, W153L, S175V
F134G, W153L, S177T
F134G, S177T, E284R
F134G, S175T, T180R
F134G, W153L, S175T, S177A
F134G, W153L, S175T, S177T
F134G, W153L, S175T, T180R
F134G, W153L, S177T, T180R
F134G, S175T, S177T, T180R
F134G, S175V, S177A, T180R
F134G, W153L, S175V, S177T, T180R
W153L, S175T
W153L, T180R
W153L, S175V
W153L, S175T, S177T
W153L, S177A, T180R
S175V, S177T, T180R
W153L, S175T, S177A, T180R
W153L, S175V, S177A, T180R
W153L, S175V, S177T, T180R
S175V, S177T, T180R, E284K
S177A, T180R
S177T, T180R
W61A, F64G, I79A, F158A, S175G, S177A, T180L, N235V, E284D, A293K
W61A, F64G, I79A, F158A, S175T, S177G, T180V, N235V, E284K, A293G
W61A, F64G, I79A, F158G, S175A, S177A, T180L, N235C, E284D, A293V
W61A, F64G, I79A, F158G, S175A, S177G, T180L, N235C, E284K, A293G
W61A, F64G, I79A, F158G, S175G, S177T, T180R, N235K, E284R, A293G
W61A, F64G, I79C, F158A, S175A, S177A, T180V, N235K, E284R, A293V
W61A, F64G, I79C, F158A, S175A, S177T, T180R, N235C, E284D, A293G
W61A, F64G, I79C, F158G, S175A, S177T, T180V, N235K, E284D, A293G
W61A, F64G, I79C, F158G, S175T, S177T, T180R, N235C, E284K, A293G
W61A, F64L, I79A, F158A, S175G, S177T, T180V, N235C, E284R, A293G
W61A, F64L, I79A, F158G, S175A, S177T, T180V, N235K, E284D, A293K
W61A, F64L, I79A, F158G, S175G, S177A, T180L, N235C, E284D, A293G
W61A, F64L, I79A, F158G, S175T, S177G, T180V, N235C, E284K, A293V
W61A, F64L, I79C, F158A, S175A, S177A, T180L, N235C, E284D, A293V
W61A, F64L, I79C, F158A, S175A, S177G, T180V, N235C, E284D, A293G
W61A, F64L, I79C, F158A, S175G, S177A, T180R, N235C, E284R, A293G
W61A, F64L, I79C, F158A, S175G, S177A, T180V, N235C, E284D, A293G
W61A, F64L, I79C, F158A, S175V, S177A, T180R, N235C, E284D, A293G
W61A, F64L, I79C, F158G, S175A, S177A, T180L, N235K, E284R, A293G
W61A, F64L, I79C, F158G, S175G, S177A, T180R, N235K, E284D, A293G
W61A, F64L, I79C, F158G, S175V, S177A, T180V, N235C, E284K, A293K
W61A, F64M, I79A, F158A, S175A, S177A, T180L, N235C, E284D, A293G
W61A, F64M, I79A, F158A, S175A, S177G, T180L, N235C, E284D, A293V
W61A, F64M, I79A, F158A, S175A, S177G, T180V, N235V, E284R, A293G
W61A, F64M, I79A, F158A, S175A, S177T, T180V, N235C, E284D, A293K
W61A, F64M, I79A, F158A, S175G, S177G, T180L, N235C, E284D, A293V
W61A, F64M, I79A, F158A, S175V, S177T, T180R, N235C, E284R, A293K
W61A, F64M, I79A, F158A, S175V, S177T, T180R, N235V, E284D, A293G
W61A, F64M, I79A, F158G, S175A, S177G, T180R, N235K, E284R, A293G
W61A, F64M, I79A, F158G, S175G, S177T, T180L, N235K, E284R, A293G
W61A, F64M, I79C, F158A, S175G, S177T, T180R, N235V, E284R, A293G
W61A, F64M, I79C, F158A, S175V, S177T, T180R, N235C, E284K, A293G
W61A, F64M, I79C, F158G, S175A, S177A, T180L, N235C, E284R, A293G
W61A, F64M, I79C, F158G, S175A, S177A, T180R
W61A, F64M, I79C, F158G, S175A, S177T, T180L, N235C, E284R, A293G
W61A, F64M, I79C, F158G, S175V, S177A, T180V, N235V, E284D, A293G
W61A, F64T, I79A, F158A, S175A, S177T, T180R, N235K, E284D, A293G
W61A, F64T, I79A, F158A, S175G, S177T, T180L, N235C, E284D, A293G
W61A, F64T, I79A, F158A, S175V, S177G, T180R, N235C, E284D, A293G
W61A, F64T, I79A, F158G, S175A, S177A, T180L, N235C, E284K, A293V
W61A, F64T, I79C, F158A, S175G, S177A, T180L, N235V, E284D, A293G
W61A, F64T, I79C, F158A, S175T, S177T, T180L, N235C, E284D, A293G
W61A, F64T, I79C, F158A, S175V, S177A, T180L, N235V, E284R, A293G
W61A, F64T, I79C, F158G, S175A, S177T, T180R, N235K, E284K, A293V
W61A, F64T, I79C, F158G, S175G, S177A, T180L, N235C, E284K, A293G
W61A, F64T, I79C, F158G, S175T, S177T, T180R, N235K, E284D, A293G
W61A, F64T, I79C, F158G, S175V, S177T, T180V, N235K, E284D, A293K
W61A, F64W, I79A, F158A, S175T, S177G, T180V, N235V, E284D, A293V
W61A, F64W, I79A, F158G, S175A, S177A, T180L, N235K, E284D, A293V
W61A, F64W, I79A, F158G, S175V, S177T, T180R, N235C, E284R, A293G
W61A, F64W, I79C, , F158G, S175G, S177G, T180L, N235K, E284D, A293V
W61A, F64W, I79C, F158A, S175A, S177A, T180R, N235C, E284D, A293G
W61A, F64W, I79C, F158A, S175V, S177A, T180L, N235K, E284D, A293G
W61A, F64W, I79C, F158G, S175A, S177A, T180L, N235K, E284D, A293G
W61A, F64W, I79C, F158G, S175G, S177T, T180R, N235C, E284R, A293G
W61V, F64G, I79A, F158G, S175V, S177A, T180R, N235V, E284D, A293G
W61V, F64G, I79C, F158A, S175T, S177G, T180V, N235K, E284D, A293G
W61V, F64L, I79A, F158A, S175A, S177G, T180R, N235C, E284R, A293G
W61V, F64L, I79A, F158A, S175G, S177G, T180L, N235K, E284R, A293K
W61V, F64L, I79A, F158A, S175G, S177G, T180V, N235K, E284D, A293G
W61V, F64L, I79A, F158G, S175A, S177G, T180R, N235C, E284R, A293G
W61V, F64L, I79A, F158G, S175A, S177T, T180L, N235C, E284D, A293G
W61V, F64L, I79A, F158G, S175G, S177G, T180L, N235V, E284D, A293G
W61V, F64M, I79A, F158A, S175A, S177G, T180R, N235C, E284D, A293G
W61V, F64M, I79A, F158A, S175G, S177A, T180V, N235V, E284R, A293G
W61V, F64M, I79A, F158A, S175T, S177A, T180L, N235C, E284K, A293V
W61V, F64M, I79A, F158G, S175A, S177G, T180V, N235C, E284R, A293V
W61V, F64M, I79A, F158G, S175G, S177G, T180V, N235K, E284K, A293G
W61V, F64M, I79C, F158A, S175A, S177G, T180R, N235K, E284D, A293G
W61V, F64M, I79C, F158A, S175G, S177T, T180L, N235V, E284R, A293G
W61V, F64M, I79C, F158G, S175V, S177T, T180R, N235C, E284K, A293V
W61V, F64T, I79A, F158G, S175A, S177T, T180L, N235C, E284D, A293G
W61V, F64T, I79A, F158G, S175T, S177A, T180V, N235K, E284D, A293G
W61V, F64T, I79C, F158A, S175T, S177A, T180L, N235C, E284D, A293G
W61V, F64T, I79C, F158A, S175T, S177A, T180V, N235C, E284D, A293G
W61V, F64T, I79C, F158G, S175A, S177A, T180L, N235V, E284K, A293G
W61V, F64T, I79C, F158G, S175G, S177T, T180R, N235C, E284R, A293G
W61V, F64W, I79A, F158G, S175V, S177T, T180R, N235C, E284D, A293K
W61V, F64W, I79C, F158G, S175A, S177T, T180V, N235C, E284K, A293G
W61V, F64W, I79C, F158G, S175A, S177T, T180V, N235V, E284K, A293K
W61V, F64W, I79C, F158A, S175T, S177T, T180R, N235K, E284R, A293G
F158A, S175A, S177G, T180V, N235K, E284R, A293G
F158A, S175A, S177T, T180L, N235C, E284D, A293V

4. The polypeptide of claim 1, wherein the polypeptide comprises a combination of amino acid differences selected from:
P5G, H7C, C41S, F64T, F134G, S175V, S177A, G204S, L249A, S295A
H7C, D10V, C41A, R46K, F64T, I79C, K125W, F134G
H7C, D10V, I79C, F134G, S175T, S177A, T180R, R190S, G204S
P5G, H7C, D10V, T180R, G204S, S241F
D10V, C41S, F64T, I79C, W153L, S175T, T180R, G204S, L249A, C277M, F280R,
Q281R, A291E, S295A, Y307H, A308E, E309V, Y310S
P5G, H7C, C41A, F64T, I79A, I113N, W153L, S175V, T180R, S194L, I197T, G204S
P5G, H7C, D10V, F64T, W153L, S175V, V188A, R190S
H7C, R46K, I79C, K125W, F134G, Y176S, S177A, T180R, G204S, C277A, L278P,
F280G, Q281R, T282P
H7C, C41S, R46K, I79C, K125W, S175T, S177T, T180R, R190S, G204S, S251A,
C277M, Q281R, A291E
P5G, C41A, K125W, W153L, S175T, S177A, T180R
H7C, S177T, T180R, S194V, G204A, S295A
P5G, H7C, C41A, F64T, K125W, F134G, S177A, G204S, C277A, F280R, F301S
D10V, C41S, R46K, F134G, W153L, S177T, T180R, V188A, R190S, M205G, L249A,
C277M, F280R
P5G, H7C, D10V, F49L, R52P, K125W, W153L, S175V, S177T, T180R, S194L, G204S,
M205G
H7C, D10V, C41A, R46K, R52P, S175V, S177A, T180R, V188A, G204S, M205G
P5G, H7C, I79C, F134G, W153L, S175V
D10V, C41S, R46K, F134G, W153L, S175V, G204S
H7C, R46K, I79A, S177A, T180R, V188A, G204S
H7C, D10V, C41A, K125W, W153L, S175T, V188S, R190S, M200R, M205G, S214C,
D219V, V243A, S251C, S264Y, Q281R, A288P
H7C, K125W, S175V, S177T, T180R, S194L, G204S, S251A, S295A
H7C, D10V, C41A, R46K, V68D, I79A, W153L, S175V, S177T, T180R, V188A, R190S,
G204S, M205G
P5G, R46K, R52P, F64T, L249A, E284R, A291E, S295A
P5G, H7C, C41S, R46K, K125W, F134G, I165T, S175T, S177T, T180R, G204S, Q281R,
S295A
H7C, D10V, C41A, F64T, W153L, S175V, S177A, T180R, M205G
P5G, C41S, R52P, I79C
P5G, H7C, R52P, I79A, F134G, W153L, G204S, M205G, L249A, C277A, F280R,
Q281R, A291E
D10V, R46K, W153L, T180R, S194V, L249A, C277M, F280R, Q281R, A291E, S295A
D10V, C41S, K125W, F134G, S175V, S177A, T180R
P5G, D10V, C41S, K125W, F134G, T180R
H7C, I79A, K125W, W153L, S175T, T180R, R190S, M205G, L249A, S251A, C277A,
F280R, A291E
P5G, H7C, D10V, C41S, R46K, I121T, K125W, F134G, W153L, S175V, S177T, T180R,
V188A, R190S, M205G
P5G, C41S, S175V, S177A, T180R, L249A, C277A
H7C, D10V, F49L, I79C, W153L, S175V, S177T, T180R, V188A, S194L
P5G, H7C, C41S, F49L, R52P, F64T, I79C, K125W, W153L, S175T, S177T, T180R,
V188A, R190S, G204S, C277M, A291E
P5G, H7C, D10V, F64T, F134G, W153L, S177T, T180R, L249A, C277A, Q281R,
A291E, S295A
H7C, D10V, I79C, S177A, T180R, V188A, R190S, A291E, S295A
H7C, D10V, C41S, R46K, I79A, K125W, S175V, T180R, R190S
P5G, H7C, D10V, I79C, K125W, S175V, S177T, R190S, G204S, M205G, L249A,
S251A, C277M, A291E
D10V, R46K, K125W, W153L, S175V, S177A, T180R, V188A, C277M, S295A
P5G, H7C, C41S, F64T, K125W, F134G, S175V, S177A, V188A, M205G
P5G, C41A, R46K, F134G, S175T, T180R, V188A, R190S
H7C, D10V, C41A, R52P, K125W, F134G, S177T, S194V
P5G, D10V, R52P, I79C, K125W, W153L
P5G, H7C, D10V, F49L, K125W, F134G, W153L, S194L, G204S, Q281R, S295A
P5G, R52P, F64T, I79C, D95N
P5G, H7C, I79A, I105V, S177A, T180R, S194V, M205G, Q281R, S295A, V314A
D10V, C41S, R46K, R52P, F64T, F134G, S177A, T180R
P5G, D10V, R46K, R52P, F64T, I79C, K125W, W153L, T180R
H7C, C41S, R52P, I79C, K125W, F134G, W153L, S175T, T180I, V188A, R190S, L249A,
S251A, F280R, Q281R, S295A
H7C, D10V, K125W, F134G, W153L, S175T, S177T
P5G, C41S, R46K, K125W, F134G, W153L, S175T, S177A, S194V
P5G, D10V, I79A, K125W, F134G, S175V, C277M, Q281R, A291E, S295A
P5G, D10V, C41A, R46K, R52P, F134G, W153L, S175T, S177T, M205G, L249A,
S251A, F280R, Q281R, A291E
P5G, C41S, I79C, W153L, S175T, M205G, L249A, S251A, C277A, F280R, A291E,
Y313P
P5G, H7C, D10V, C41A, R52P, T123K, K125W
P5G, D10V, C41A, R46K, K125W, F134G, W153L, S175V, S177T, T180R, G204S,
M205G, S253P, F280R, A291E, S295A, F315S
H7C, C41A, F49L, I79C, K125W, W153L, S177T
P5G, H7C, C41A, S177A, T180R, M205G, L249A, S251A, C277A, A291E, S295A,
F299L
H7C, D10V, C41S, F64T, S177A, V188A, M205G, L249A, S251A, A291E, S295A
H7C, D10V, R46K, F134V
P5G, H7C, F49L, F64T, I79C, K125W, W153L, S175T, S194L, C277M, F280R, Q281R,
A291E, S295A
P5G, D10V, F64T, F134G, S175T, S177T, T180R, L249A, S251A, A291E
P5G, H7C, D10V, I79A, K125W, W153L, E284K, A291E
P5G, D10V, F49L, R52P, F134G, S194L, S251A, W258R, Q281R, A291E, S295A
H7C, D10V, C41S, I79C, F134G, V188A, R190S, S214C, A291E, S295A, F311S
C41A, I79A, K125W, F134G, W153L, S175T, S177T, T180R
P5G, H7C, I79A, S175V, S177T, L249A, S251A, W258R, Q281R
H7C, D10V, C41A, R46K, F64T, V115A, K125W, T180R, C277A, F280R, S295A
D10V, C41A, R46K, R52P, F64T, K125W, F134G, W153L, S177A, T180R, S214C,
L249A, E284K, S295A, A308P
P5G, D10V, C41A, R46K, I79A, F134G, W153L, L249A, Q281R, S295A
P5G, H7C, R46K, K125W, S175V, S177T, T180R, M205G, L249A, E284K, S295A
D10V, C41S, R46K, F65L, K125W, W153L, S177A, T180R, S194L, L249A, S251A,
C277A
C41A, R46K, I79C, K93N, K125W
P5G, H7C, R52P, I79C, K125W, W153L, S177T, T180R, S194L
C41A, R46K, W153L, S175V, M205G
H7C, R52P, W153L, S175V, G204S, M205G, C277M, Q281R, S295A
P5G, R52P, I79A, K125W
P5G, H7C, D10V, C41S, F49L, R52P, F64T, S175V, S177A, M205G
P5G, F49L, I79A, S177T
P5G, D10V, C41S, R46K, I79N, F134G, S175V, S177T, T180R, M205G, A291E, S295A
H7C, D10V, R46K, K125W, F158S, S175V, S177T, T180R, V188A, R190S, M205R,
L249A, C277R, F280R, Q281R, A291E, Y310S
P5G, H7C, C41A, R52P, F134G, W153L, S175T, L249A, S251A, E284R, S295A, L305S
H7C, C41S, R46K, K125W, S194L, Q281R, A291E
H7C, F49L, K125W, F134G, S177T, M205G, E284R, A291E, S295A
P5G, H7C, D10V, C41A, R46K, F134G, F144S, W153L, G204S, L249A, S251A, C277M,
F280R, Q281R
P5G, R46K, L54S, K125W, W153L, S175T, S177T, S214C, F276L, F280R, Q281R,
A308P, Y310C, Y313H
P5G, D10V, R46K, I79C
P5G, D10V, R46K, W153L, S175V, S177T, T180R, S214C, S251A, C277M, F280R,
Q281R, S295A, F301S, I302L, W303C, L304R, Y310S, F311S
D10V, R46K, F64T, I79A, W153L, S177A, T180R, S194L, S251A, S295A
H7C, D10V, C41A, S175V, F193L
H7C, C41A, R46K, R52P, K125W, F134G, S177T
P5G, H7C, D10V, C41A, K125W, S194L, G204S, M205G, F280R, A291E, S295A
P5G, F49L, R52P, K125W, F134G, W153L, S177T, R190S, M205G, S214C, F280R,
A291E, S295A, V312G, Y313H
H7C, D10V, K125W, F134G
D10V, F49L, R52P, F64T, W153L, S175V, S177A, Q281R, S295A, F311P
H7C, D10V, C41S, R46K, K125W, W153L, S194A
R52P, F64T, I79C, F134G, S177A, T180R, L249A, M267T, C277M, Q281R, L287F,
A288P, Y290S
D10V, F64T, I79C, K125W, F134G, I140T, S177A, L249A, C277M, Q281R, A291E
D10V, K34E, F49L
H7C, D10V, C41A, R46K, F64T, K125W, R190S, M205G, C277A, S295A, Y307S,
A308R, Y310S
P5G, H7C, D10V, C41G, K125W, F134G, L249V, F280L, A291E
P5G, F64T, I79C, W153L, I165T, Q281R, A291E, S295A
H7C, R46K, F64T, I91V, W153L, S175V, S177T, I196T, M205G, L249A, C277M, A291E,
Y310P
H7C, C41A, K125W, F134G, W153L, S175T, T180R, R190S, M205G, E217G
P5G, D10W, C41G, F49M, W61A, F64W, I79A, K125M, F158G, S175A, S177A, T180L,
R190S, S194V, N235K, F238W, C277A, E284D, A293V
P5G, D10V, C41S, F49M, W61A, F64L, I79C, K125V, F158G, S175V, S177A, T180V,
R190S, S194V, N235C, F238L, C277A, E284K, A293K
P5G, D10V, C41A, F49L, W61A, F64G, I79C, K125V, F158G, S175A, S177T, T180V,
R190S, S194V, N235K, F238W, C277A, E284D, A293G
C41A, F49L, W61V, F64T, I79A, K125M, F158G, S175A, S177T, T180L, R190A, S194V,
N235C, F238W, C277A, E284D, A293G
P5G, D10L, C41A, F49L, W61A, F64T, I79C, K125M, F158G, S175A, S177T, T180R,
R190S, S194A, N235K, F238W, C277M, E284K, A293V
P5G, D10W, C41S, F49L, W61A, F64T, I79A, K125M, F158G, S175A, S177A, T180L,
R190Q, S194L, N235C, F238L, C277M, E284K, A293V
P5G, D10L, C41G, F49R, W61A, F64T, I79C, K125W, F158G, S175T, S177T, T180R,
R190S, S194L, N235K, F238L, C277A, E284D, A293G
P5V, D10L, C41A, F49L, W61A, F64W, I79A, K125V, F158G, S175V, S177T, T180R,
R190A, S194A, N235C, F238L, C277A, E284R, A293G
P5G, D10V, C41A, F49L, W61A, F64M, I79C, K125V, F158G, S175A, S177T, T180L,
R190S, S194V, N235C, F238W, C277M, E284R, A293G
P5G, D10W, C41A, F49L, W61A, F64G, I79C, K125W, F158G, S175T, S177T, T180R,
R190S, S194L, N235C, F238W, C277A, E284K, A293G
P5V, D10L, C41A, F49L, W61V, F64M, I79C, K125V, F158G, S175V, S177T, T180R,
R190A, S194A, N235C, F238W, C277M, E284K, A293V
P5G, D10L, C41G, F49L, W61V, F64W, I79C, K125M, F158G, S175A, S177T, T180V,
R190A, S194A, N235C, F238L, N11D, C277M, E284K, A293G
P5G, D10V, C41A, F49R, W61A, F64M, I79C, K125W, F158G, S175A, S177A, T180R
P5V, D10V, C41S, F49M, W61A, F64M, I79A, K125W, F158G, S175A, S177G, T180R,
R190S, S194V, N235K, F238L, C277M, E284R, A293G
P5V, D10V, C41A, F49R, W61A, F64L, I79A, K125M, F158G, S175T, S177G, T180V,
R190Q, S194A, N235C, F238L, C277M, E284K, A293V
P5G, D10V, C41A, F49L, W61V, F64G, I79A, K125V, A129T, F158G, S175V, S177A,
T180R, R190Q, S194L, N235V, F238L, C277M, E284D, A293G
P5G, D10V, C41A, F49L, W61V, F64L, I79A, K125V, F158G, S175A, S177T, T180L,
R190A, S194A, N11D, N235C, F238L, C277M, E284D, A293G
P5V, D10V, C41A, F49L, W61V, F64T, I79C, K125M, F158G, S175A, S177A, T180L,
R190Q, S194A, N235V, F238W, C277M, E284K, A293G
P5V, D10W, C41S, F49M, W61A, F64L, I79A, K125W, F158G, S175A, S177T, T180V,
R190S, S194A, N235K, F238L, C277A, E284D, A293K
P5V, D10L, C41A, F49L, W61A, F64M, I79C, K125M, F158G, S175A, S177A, T180L,
R190S, S194L, N235C, F238L, C277A, E284R, A293G
P5G, D10V, C41S, F49L, W61V, F64L, I79A, K125W, F158G, S175A, S177G, T180R,
R190S, S194A, N235C, F238L, C277M, E284R, A293G
P5V, D10V, C41A, F49L, W61V, F64M, I79A, K125W, F158G, S175A, S177G, T180V,
R190G, S194A, N235C, F238W, C277A, E284R, A293V
P5V, D10V, C41S, F49M, W61V, F64G, I79C, K125W, F158A, S175T, S177G, T180V,
R190S, S194A, N235K, F238W, C277A, E284D, A293G
P5V, D10W, C41S, F49L, W61A, F64L, I79C, K125M, F138I, F158G, S175A, S177A,
T180L, R190S, S194V, N235K, F238W, C277M, E284R, A293G
C41S, F49R, W61A, F64L, I79C, K125V, F158A, S175V, S177A, T180R, R190S, S194L,
N235C, F238W, C277A, E284D, A293G
P5G, D10V, C41A, F49M, W61A, F64G, I79A, K125W, F158G, S175G, S177T, T180R,
R190S, S194V, N235K, F238L, C277A, E284R, A293G
P5G, D10V, C41S, F49L, W61A, F64G, I79A, K125W, F158G, S175A, S177G, T180L,
R190Q, S194V, N235C, F238W, C277M, E284K, A293G
P5G, D10V, C41S, F49M, W61A, F64M, I79A, K125W, F158A, S175A, S177T, T180V,
R190S, S194L, N235C, F238L, C277M, E284D, A293K
P5G, D10V, C41A, F49M, W61A, F64L, I79C, K125M, A129T, F158G, S175G, S177A,
T180R, R190A, S194L, N235K, F238L, C277A, E284D, A293G
P5G, D10L, C41S, F49M, W61V, F64W, I79C, K125V, F158A, S175T, S177T, T180R,
R190S, S194A, N235K, F238L, C277A, E284R, A293G
P5V, D10W, C41G, F49R, W61V, F64T, I79A, K125V, F158G, S175T, S177A, T180V,
R190S, S194V, N235K, F238L, C277M, E284D, A293G
P5G, D10V, C41A, F49L, W61A, F64M, I79C, K125M, F158G, S175V, S177A, T180V,
R190Q, S194A, N235V, F238W, C277M, E284D, A293G
P5V, D10W, C41S, F49M, W61A, F64T, I79C, K125M, F158G, S175V, S177T, T180V,
R190A, S194A, N235K, F238W, C277A, E284D, A293K
C41A, F49L, W61A, F64T, I79A, K125M, F158A, S175V, S177G, T180R, R190Q,
S194A, N235C, F238W, C277M, E284D, A293G
P5G, D10L, C41S, F49M, W61V, F64M, I79C, K125W, F158A, S175A, S177G, T180R,
R190S, S194A, N235K, F238W, C277M, E284D, A293G
P5V, D10W, C41G, F49R, W61A, F64M, I79A, K125V, F158A, S175V, S177T, T180R,
R190S, S194V, N235C, F238L, C277M, E284R, A293K
P5V, D10V, C41A, F49L, W61V, F64M, I79A, K125W, F158A, S175A, S177G, T180R,
R190S, S194V, N235C, F238L, C277A, E284D, A293G
P5G, D10W, C41G, F49L, W61V, F64W, I79C, K125W, F158G, S175A, S177T, T180V,
R190A, S194A, N235V, F238W, C277M, E284K, A293K
P5G, D10V, C41S, F49M, W61V, F64W, I79A, K125W, F158G, S175V, S177T, T180R,
R190Q, S194A, N235C, F238L, C277A, E284D, A293K
P5G, D10L, C41G, F49L, W61A, F64M, I79A, K125V, F158A, S175A, S177G, T180V,
R190G, S194L, N235V, F238W, C277M, E284R, A286G, A293G
P5G, D10W, C41A, F49L, W61A, F64M, I79A, K125W, F158G, S175G, S177T, T180L,
R190Q, S194A, N235K, F238L, C277A, E284R, A293G
P5V, D10L, C41S, F49L, W61A, F64L, I79C, K125M, F158A, S175G, S177A, T180R,
R190Q, S194V, N235C, F238L, C277M, E284R, A293G
C41S, F49L, W61A, F64M, I79A, K125M, F158A, S175V, S177T, T180R, R190G,
S194L, N235V, F238L, C277A, E284D, A293G
P5G, D10V, C41A, F49M, W61A, F64T, I79C, K125V, F158A, S175V, S177A, T180L,
R190S, S194A, N235V, F238W, C277M, E284R, A293G
P5G, D10V, C41G, F49R, W61A, F64T, I79A, K125W, F158A, S175G, S177T, T180L,
R190S, S194L, N235C, F238L, C277M, E284D, A293G
P5G, D10W, C41A, F49M, W61V, F64T, I79C, K125M, F158A, S175T, S177A, T180L,
R190A, S194L, N235C, F238W, C277M, E284D, A293G
P5G, D10L, C41A, F49L, W61A, F64L, I79A, K125W, F158A, S175G, S177T, T180V,
R190A, S194A, N235C, F238W, C277M, E284R, A293G
P5G, D10L, C41A, F49M, W61A, F64L, I79C, K125V, F158A, S175G, S177A, T180V,
R190A, F195V, S194L, N235C, F238W, C277A, E284D, A293G
P5V, D10L, C41G, F49M, W61V, F64T, I79C, K125W, F158A, S175T, S177A, T180V,
R190S, S194V, N235C, F238W, C277A, E284D, A293G
P5G, D10W, C41S, F49L, W61V, F64L, I79A, K125W, F158A, S175A, S177G, T180R,
R190G, S194L, N235C, F238W, C277A, E284R, A293G
P5G, D10V, C41A, F49M, W61A, F64G, I79A, K125V, F158G, S175A, S177A, T180L,
R190Q, S194L, N235C, F238W, C277M, E284D, A293V
P5G, D10W, C41G, F49M, W61A, F64W, I79C, K125M, F158G, S175A, S177A, T180L,
R190A, S194L, N235K, F238W, C277M, E284D, A293G
P5V, D10W, C41G, F49L, W61A, F64W, I79C, K125V, F158G, S175G, S177G, T180L,
R190S, S194A, N235K, F238L, C277A, E284D, A293V
P5G, D10W, C41A, F49L, W61A, F64G, I79C, K125W, F158A, S175A, S177A, T180V,
R190S, S194A, N235K, F238W, C277A, E284R, A293V
P5V, D10L, C41S, F49L, W61A, F64M, I79A, K125W, F158A, S175A, S177A, T180L,
R190S, S194L, N235C, F238L, C277A, E284D, A293G
P5G, D10L, C41A, F49L, W61A, F64M, I79C, K125V, F158A, S175V, S177T, T180R,
R190A, S194A, N235C, F238W, C277M, E284K, A293G
P5G, D10V, C41S, F49L, W61A, F64T, I79C, K125M, F158A, S175T, S177T, T180L,
R190Q, S194L, N235C, F238L, C277A, E284D, A293G
K125W, F158A, S175A, S177T, T180L, R190Q, S194A, N235C, F238L, C277A, E284D,
A293V
P5G, D10V, C41A, F49L, W61V, F64L, I79A, K125M, F158A, S175G, S177G, T180L,
R190G, S194V, N235K, F238L, C277A, E284R, A293K
P5V, D10L, C41G, F49L, W61V, F64T, I79C, K125V, F158G, S175G, S177T, T180R,
R190S, S194L, N235C, F238L, C277M, E284R, A293G
P5V, D10V, C41S, F49M, W61A, F64M, I79A, K125W, F158A, S175A, S177G, T180L,
R190G, S194A, N235C, F238L, C277A, E284D, A293V
P5G, D10W, C41S, F49M, W61A, F64W, I79C, K125W, F158A, S175A, S177A, T180R,
R190S, S194A, N235C, F238W, C277M, E284D, A293G
P5V, D10V, C41G, F49L, W61V, F64M, I79C, K125V, F158A, S175G, S177T, T180L,
R190Q, S194A, N235V, F238L, C277M, E284R, A293G
P5V, D10L, C41S, F49L, W61A, F64T, I79C, K125M, F158G, S175G, S177A, T180L,
R190A, S194A, N235C, F238L, C277M, E284K, A293G
P5G, D10V, C41A, F49L, W61A, F64G, I79C, K125W, F158A, S175A, S177T, T180R,
R190S, S194V, N235C, F238W, C277A, E284D, A293G
P5G, D10W, C41G, F49R, W61A, F64L, I79C, K125M, F158A, S175A, S177A, T180L,
R190A, S194V, N235C, F238W, C277M, E284D, A293V
C41A, F49L, W61V, F64L, I79A, K125V, F158G, S175G, S177G, T180L, R190G,
S194A, N235V, F238W, C277A, E284D, A293G
K125W, F158A, S175A, S177G, T180V, R190S, S194L, N235K, F238W, C277M,
E284R, A293G
P5V, D10V, C41S, F49M, W61A, F64M, I79C, K125M, F158A, S175G, S177T, T180R,
R190S, S194A, N235V, F238W, C277A, E284R, A293G
P5G, D10W, C41A, F49L, W61A, F64L, I79C, K125W, F158A, S175A, S177G, T180V,
R190A, S194A, N235C, F238W, C277A, E284D, A293G
P5G, D10W, C41S, F49L, W61A, F64W, I79A, K125V, F158A, S175T, S177G, T180V,
R190A, S194L, N235V, F238L, C277M, E284D, A293V
P5V, D10W, C41G, F49L, W61A, F64G, I79A, K125M, F158A, S175G, S177A, T180L,
R190S, S194V, N235V, F238L, C277A, E284D, A293K
P5G, D10L, C41A, F49L, W61A, F64W, I79C, K125W, F158A, S175V, S177A, T180L,
R190S, S194L, N235K, F238W, C277M, E284D, A293G
P5V, D10L, C41G, F49R, W61V, F64M, I79A, K125W, F158A, S175T, S177A, T180L,
R190Q, S194L, N235C, F238W, C277M, E284K, A293V
P5V, D10W, C41G, F49L, W61A, F64G, I79A, K125V, F158A, S175T, S177G, T180V,
R190Q, S194V, N235V, F238W, C277M, E284K, A293G
P5V, D10W, C41G, F49R, W61A, F64L, I79A, K125M, F158G, S175G, S177A, T180L,
R190S, S194L, N235C, F238W, C277M, E284D, A293G
P5V, D10W, C41G, F49R, W61A, F64T, I79A, K125V, F158A, S175A, S177T, T180R,
R190G, S194V, N235K, F238W, C277M, E284D, A293G
P5G, D10W, C41S, F49L, W61A, F64T, I79C, K125V, F158A, S175G, S177A, T180L,
R190S, S194A, N235V, F238L, C277A, E284D, A293G
P5V, D10W, C41G, F49L, W61A, F64M, I79A, K125V, F158A, S175G, S177G, T180L,
R190Q, S194L, N235C, F238L, C277A, E284D, A293V
P5G, D10V, C41S, F49M, W61A, F64W, I79C, K125V, F158G, S175G, S177T, T180R,
R190A, S194L, N235C, F238L, C277M, E284R, A293G
P5G, D10V, C41G, F49R, W61V, F64M, I79A, K125V, F158G, S175G, S177G, T180V,
R190S, S194V, N235K, F238W, C277A, E284K, A293G
P5G, D10L, C41S, F49L, W61V, F64L, I79A, K125M, F158A, S175G, S177G, T180V,
R190A, S194A, N235K, F238W, C277M, E284D, A293G
F49R, W61V, F64M, I79A, K125W, F158A, S175G, S177A, T180V, R190Q, S194V,
N235V, F238W, C277M, E284R, A293G

5. The polypeptide of claim 1, wherein the polypeptide is encoded by a polynucleotide sequence having at least 80% identity to SEQ ID NO: 19, and a silent codon difference as compared to SEQ ID NO: 19 at a position encoding an amino acid residue selected from: V33, I37, F73, N74, A78, Q82, K93, P97, V99, S104, L111, L117, G119, F132, V133, I137, G139, F141, R152, Q155, N160, S166, A182, T201, G218, I213, V224, S225, A233, G242, V261, K263, F276, S295, L304, Y306, F311, and V312;
optionally, wherein the codon differences are selected from: V33 (GTT>GTC), I37 (ATT>ATC), F73 (TTT>TTC), N74 (AAT>AAC), A78 (GCA>GCG), Q82 (CAA>CAG), K93 (AAG>AAA), P97 (CCA>CCG), V99 (GTT>GTC), S104 (TCA>TCT), L111 (TTA>TTG), L117 (TTG>CTG), G119 (GGT>GGC), F132F (TTC>TTT), V133 (GTT>GTC), G139 (GGT>GGG), R152 (AGA>CGT), Q155 (CAA>CAG), N160 (AAT>AAC), L162 (TTG>CTG), S166 (TCT>TCC), A182 (GCA>GCC), T201 (ACT>ACG), I213 (ATC>ATT), G218 (GGT>GGG), V224 (GTT>GTC), S225 (TCA>TCG), A233 (GCA>GCG), G242 (GGT>GGC), V261 (GTT>GTC), K263 (AAA>AAG), F276 (TTC>TTT), S295 (TCA>TCT), L304 (TTG>CTG), Y306 (TAT>TAC), F311 (TTT>TTC), and V312 (GTT>GTC).

6. The polypeptide of claim 1, wherein the polypeptide comprises an amino acid sequence of at least 80% identity to a sequence selected from the group consisting of SEQ ID NO: 22, 24, 26, 28, 30, 32, 34, 36, 38, 40, 42, 44, 46, 48, 50, 52, 54, 56, 58, 60, 62, 64, 66, 68, 70, 72, 74, 76, 78, 80, 82, 84, 86, 88, 90, 92, 94, 96, 98, 100, 102, 104, 106, 108, 110, 112, 114, 116, 118, 120, 122, 124, 126, 128, 130, 132, 134, 136, 138, 140, 142, 144, 146, 148, 150, 152, 154, 156, 158, 160, 162, 164, 166, 168, 170, 172, 174, 176, 178, 180, 182, 184, 186, 188, 190, 192, 194, 196, 198, 200, 202, 204, 206, 208, 210, 212, 214, 216, 218, 220, 222, 224, 226, 228, 230, 232, 234, 236, 238, 240, 242, 244, 246, 248, 250, 252, 254, 256, 258, 260, 262, 264, 266, 268, 270, 272, 274, 276, 278, 280, 282, 284, 286, 288, 290, 292, 294, 296, 298, 300, 302, 304, 306, 308, 310, 312, 314, 316, 318, 320, 322, 324, 326, 328, 330, 332, 334, 336, 338, 340, 342, 344, 346, 348, 350, 352, 354, 356, 358, 360, 362, 364, 366, 368, 370, 372, 374, 376, 378, 380, 382, 384, 386, 388, 390, 392, 394, 396, 398, 400, 402, 404, 406, 408, 410, 412, 414, 416, 418, 420, 422, 424, 426, 428, 430, 432, 434, 436, 438, 440, 442, 444, 446, 448, 450, 452, 454, 456, 458, 460, 462, 464, 466, 468, 470, 472, 474, 476, 478, 480, 482, 484, 486, 488, 490, 492, 494, 496, 498, 500, 502, 504, 506, 508, 510, 512, and 514.

7. The polypeptide of claim 1, wherein the polypeptide further comprises an N-terminal truncation of from 2 to 12 amino acids as compared to SEQ ID NO: 20;
optionally, wherein, the polypeptide comprises an amino acid sequence of at least 80% identity to a sequence selected from the group consisting of SEQ ID NO: 516, 518, 520, 522, and 524.

8. The polypeptide of claim 1 in which the prenyltransferase activity of the polypeptide as compared to a polypeptide consisting of SEQ ID NO: 20 is increased at least 1.2-fold.

9. The polypeptide of claim 8 in which the prenyltransferase activity is measured as the rate of conversion of the substrates olivetolic acid (OA) and geranyl pyrophosphate (GPP) to cannabigerolic acid (CBGA); optionally, under reaction conditions of pH 7 and 30 C.

10. A polynucleotide encoding the polypeptide of claim 1; optionally, wherein the polynucleotide sequence
(a) has at least 80% identity to a sequence selected from the group consisting of SEQ ID NO: 21, 23, 25, 27, 29, 31, 33, 35, 37, 39, 41, 43, 45, 47, 49, 51, 53, 55, 57, 59, 61, 63, 65, 67, 69, 71, 73, 75, 77, 79, 81, 83, 85, 87, 89, 91, 93, 95, 97, 99, 101, 103, 105, 107, 109, 111, 113, 115, 117, 119, 121, 123, 125, 127, 129, 131, 133, 135, 137, 139, 141, 143, 145, 147, 149, 151, 153, 155, 157, 159, 161, 163, 165, 167, 169, 171, 173, 175, 177, 179, 181, 183, 185, 187, 189, 191, 193, 195, 197, 199, 201, 203, 205, 207, 209, 211, 213, 215, 217, 219, 221, 223, 225, 227, 229, 231, 233, 235, 237, 239, 241, 243, 245, 247, 249, 251, 253, 255, 257, 259, 261, 263, 265, 267, 269, 271, 273, 275, 277, 279, 281, 283, 285, 287, 289, 291, 293, 295, 297, 299, 301, 303, 305, 307, 309, 311, 313, 315, 317, 319, 321, 323, 325, 327, 329, 331, 333, 335, 337, 339, 341, 343, 345, 347, 349, 351, 353, 355, 357, 359, 361, 363, 365, 367, 369, 371, 373, 375, 377, 379, 381, 383, 385, 387, 389, 391, 393, 395, 397, 399, 401, 403, 405, 407, 409, 411, 413, 415, 417, 419, 421, 423, 425, 427, 429, 431, 433, 435, 437, 439, 441, 443, 445, 447, 449, 451, 453, 455, 457, 459, 461, 463, 465, 467, 469, 471, 473, 475, 477, 479, 481, 483, 485, 487, 489, 491, 493, 495, 497, 499, 501, 503, 505, 507, 509, 511, and 513; or
(b) is a codon degenerate sequence of a sequence selected from the group consisting of SEQ ID NO: 21, 23, 25, 27, 29, 31, 33, 35, 37, 39, 41, 43, 45, 47, 49, 51, 53, 55, 57, 59, 61, 63, 65, 67, 69, 71, 73, 75, 77, 79, 81, 83, 85, 87, 89, 91, 93, 95, 97, 99, 101, 103, 105, 107, 109, 111, 113, 115, 117, 119, 121, 123, 125, 127, 129, 131, 133, 135, 137, 139, 141, 143, 145, 147, 149, 151, 153, 155, 157, 159, 161, 163, 165, 167, 169, 171, 173, 175, 177, 179, 181, 183, 185, 187, 189, 191, 193, 195, 197, 199, 201, 203, 205, 207, 209, 211, 213, 215, 217, 219, 221, 223, 225, 227, 229, 231, 233, 235, 237, 239, 241, 243, 245, 247, 249, 251, 253, 255, 257, 259, 261, 263, 265, 267, 269, 271, 273, 275, 277, 279, 281, 283, 285, 287, 289, 291, 293, 295, 297, 299, 301, 303, 305, 307, 309, 311, 313, 315, 317, 319, 321, 323, 325, 327, 329, 331, 333, 335, 337, 339, 341, 343, 345, 347, 349, 351, 353, 355, 357, 359, 361, 363, 365, 367, 369, 371, 373, 375, 377, 379, 381, 383, 385, 387, 389, 391, 393, 395, 397, 399, 401, 403, 405, 407, 409, 411, 413, 415, 417, 419, 421, 423, 425, 427, 429, 431, 433, 435, 437, 439, 441, 443, 445, 447, 449, 451, 453, 455, 457, 459, 461, 463, 465, 467, 469, 471, 473, 475, 477, 479, 481, 483, 485, 487, 489, 491, 493, 495, 497, 499, 501, 503, 505, 507, 509, 511, and 513.

11. A host cell comprising the polynucleotide of claim 10.

12. A method for preparing a recombinant polypeptide having prenyltransferase activity comprising:
(a) transforming a host cell with an expression vector comprising a polynucleotide encoding a recombinant polypeptide of claim 10;
(b) culturing said transformed host cell under conditions whereby said recombinant polypeptide is produced by said host cell; and
(c) recovering said recombinant polypeptide from said host cells.

13. A recombinant host cell comprising a nucleic acid encoding a recombinant polypeptide having prenyltransferase activity of claim 1.

14. The host cell of claim 13, wherein the nucleic acid encodes a N-terminal fusion of the Erg20ww polypeptide of SEQ ID NO: 526 and the recombinant polypeptide having prenyltransferase activity of claim 1.

15. The host cell of claim 13, wherein the host cell further comprises a pathway of enzymes capable of converting hexanoic acid (HA) to olivetolic acid (OA); optionally, wherein the pathway comprises at least the enzymes AAE, OLS, and OAC.

16. The host cell of claim 13, wherein the cell produces the cannabinoid, CBGA; optionally, wherein the production of CBGA is increased at least 2-fold, at least 3-fold, at least 4-fold, at least 5-fold, or more, relative to a control recombinant host cell comprising a pathway with the recombinant polypeptide having prenyltransferase activity replaced by a polypeptide of SEQ ID NO: 20.

17. The host cell of claim 13, wherein recombinant host cell source is selected from Saccharomyces cerevisiae, Yarrowia lipolytica, Pichia pastoris, and Escherichia coli.

18. The host cell of claim 13, wherein the nucleic acid is integrated in the host cell genome at a locus selected from: NDE1, XII-5, Gal80, ROQ1; optionally, wherein the nucleic acid is integrated in the host cell genome at two loci selected from: XII-5 and NDE1; or ROQ1 and NDE1.

19. A method for producing a cannabinoid comprising:
(a) culturing in a suitable medium a recombinant host cell of claim 13; and
(b) recovering the produced cannabinoid.

20. A method for preparing a compound of structural formula (I) [symbol]
(I)
wherein, R¹ is C1-C7 alkyl,
comprising contacting under suitable reactions conditions geranyl pyrophosphate (GPP) and a compound of structural formula (II) [chemical structure]
wherein, R¹ is C1-C7 alkyl,
and a recombinant polypeptide of claim 1.
